(19) United States
(12) Patent Application Publication
(10) Pub. No.: US 2006/0024693 A1
(43) Pub. Date: Feb. 2, 2006

(54) Identification of genes or polypeptides the expression of which correlates to fertility, ovarian function and/or fetal/newborn viability

(75) Inventors: Jose Cibelli, East Lansing, MI (US); Javier Crosby, Santiago (CL); Emilio Fernandez, Santiago (CL); Arif Kocabas, East Lansing, MI (US); Guilherme Jordao De Magalhaes Rosa, East Lansing, MI (US)

Correspondence Address: CROWELL & MORING LLP;INTELLECTUAL PROPERTY GROUP, P.O. BOX 14300, WASHINGTON, DC, 20044-4300, US

(73) Assignee: Michigan State University, East Lansing, MI (US)

(21) Appl. No.: 11/091,883

(22) Filed: Mar. 29, 2005

Related U.S. Application Data
(60) Provisional application No. 60/556,875, filed on Mar. 29, 2004.

(51) Int. Cl. C12Q 1/68; C12N 5/06

(52) U.S. Cl. 435/6

(57) ABSTRACT

A genetic means of determining whether a female subject produces “pregnancy competent” oocytes is provided. The means comprises detecting the level of expression of one or more genes that are expressed at characteristic levels (upregulated or downregulated) in cumulus cells derived from pregnancy competent oocytes. This characteristic gene expression level, or pattern referred to herein as the “pregnancy signature”, also can be used to identify subjects with underlying conditions that impair or prevent the development of a viable pregnancy, e.g., pre-menopausal condition, other hormonal dysfunction, ovarian dysfunction, ovarian cyst, cancer or other cell proliferation disorder, autoimmune disease and the like. Microarrays containing “pregnancy signature” genes or corresponding polypeptides provide another preferred aspect of the invention. Still further, the subject invention can be used to derive animal models, e.g., non-human primate animal models, for the evaluation of the efficacy of putative female fertility treatments.

### CROSS REFERENCE TO RELATED APPLICATIONS

[0001] Ths application claims the benefit of provisional application No. 60/556,875 filed Mar. 29, 2004, which is incorporated herein by reference in its entirety.

### FIELD OF THE INVENTION

[0002] The present invention provides genetic methods that provide for the identification of “pregnancy competent” oocytes, i.e., oocytes that when fertilized and transferred to a suitable uterine environment are capable of yielding a viable pregnancy. The present invention further provides genetic methods of identifying subjects, preferably human females having impaired fertility function, e.g., as a result of impaired ovarian function, e.g., as a result of age (menopause) or an underlying disease condition.

[0003] Also, the invention provides methods of evaluating the efficacy of a putative fertility treatment based on its effect on the expression of specific genes.

### BACKGROUND OF THE INVENTION

[0004] Currently, there is no available genetic procedures for identifying whether a female subject produces oocytes that are “pregnancy competent”, i.e., which when fertilized by natural or artificial means are capable of giving rise to embryos that in turn are capable of yielding viable offspring when transferred to an appropriate uterine environment. Rather, conventional fertility assessment methods assess fertility e.g., based on hormonal levels, visual inspection of numbers and quality of oocytes, surgical or non-invasive (MRI) inspection of the female reproduction system organs, and the like. Often, when a woman has a problem in producing a viable pregnancy after a prolonged duration, e.g., more than a year, the diagnosis may be an “unexplained” fertility problem and the woman advised to simply keep trying or to seek other options, e.g., adoption or surrogacy. Therefore, providing alternative and more predictive methods for identifying women with fertility problems would be highly desirable. Likewise, novel and improved methods for treating fertility problems would be highly desirable.

[0005] Still further, the identification of women with fertility problems, preferably earlier on than by current methods is desirable, as fertility problems may correlate to other health issues that preclude pregnancy, e.g., cancer, menopausal condition, hormonal dysfunction, ovarian cyst, or other underlying disease or health related problems.

### BRIEF DESCRIPTION AND OBJECTS OF THE INVENTION

[0006] It is an object of the invention to provide a novel and improved method of detecting infertility problems and the genetic basis thereof.

[0007] It is a more specific object of the invention to provide a novel method of detecting female fertility or infertility which method comprises evaluating the capability of oocytes produced by said female to potentially give rise to a viable pregnancy upon fertilization and transferral into a suitable uterine environment, wherein said method involves detecting the levels of expression of specific (“pregnancy signature”) genes or polypeptides encoded thereby.

[0008] It is another specific object of the invention to provide a method of evaluating whether a subject produces oocytes capable of giving rise to a viable pregnancy comprising:
[0009] (i) measuring the expression levels of genes in a oocyto-derived cell, e.g., a cumulus cell, wherein said genes are expressed or not expressed at characteristic levels (“pregnancy signature”) in cells associated with oocytes capable of yielding a viable pregnancy; and
[0010] (ii) detecting the “pregnancy potential” of said oocytes based on the level of similarity of said gene expression pattern to said “pregnancy signature”.

[0011] It is another specific object of the invention to identify a female subject putatively having a condition that inhibits or prevents pregnancy by detecting whether said subject produces oocytes associated with cells, e.g., cumulus cells, which do not express one or more genes in a manner characteristic of “pregnancy competent” oocytes; wherein said method comprises detecting the expression of said one or more “pregnancy signature” genes in at least one cell derived from an oocyte isolated from said female subject; and thereby identifying the subject as potentially having a health problem which prevents or precludes fertility based on an abnormal expression pattern of at least one of said “pregnancy signature” genes.

[0012] It is another object of the invention to provide a method of evaluating the efficacy of a female fertility treatment which comprises:
[0013] (i) treating a female subject putatively having a problem that prevents or inhibits her from having a “viable pregnancy” and
[0014] (ii) isolating at least one oocyte from said female subject after said fertility treatment;
[0015] (iii) isolating at least one cell from said isolated oocyte, preferably cumulus cell, and detecting the level of expression of at least one gene that is expressed at a characteristic level of expression in “pregnancy competent” oocytes; and
[0016] (iv) determining the putative efficacy of said fertility treatment based on whether said gene is expressed at a level characteristic of “pregnancy competent” oocytes as a result of treatment.

[0017] It is another object of the invention to provide animal models for evaluating the efficacy of putative fertility treatments comprising identifying genes which are expressed at characteristic levels in cumulus cells derived from pregnancy competent oocytes of a non-human animal, e.g., a non-human primate; and assessing the efficacy of a putative fertility treatment in said non-human animal based on its effect on said gene expression levels, i.e., whether said treatment results in said gene expression levels better mimicking gene expression levels observed in cumulus cells associated with pregnancy competent oocytes, (“pregnancy signature”).

### BRIEF DESCRIPTION OF THE FIGURES

[0018] FIGS. 1A-1C and 1D-1I depict schematically a genetic fertility testing method according to the invention. FIG. 1A shows a freshly ovulated egg containing a polar body, zona pellucida and cumulus cells. FIG. 1B shows the fertilization and transferral of this egg into a uterine environment. FIG. 1C shows the recovery of cumulus cells from the oocytes shown in 1A which are to be used for genetic testing. FIG. 1D-1I show the isolation of RNAs from said cumulus cells, microarray analysis of said RNAs, validation of 100 genes by real time RT-PCR, correlation of the levels of expression of said genes (upregulated or downregulated) to the ability of an oocyte to give rise to a viable pregnancy, and the use of this gene expression profile to identify a set of genes, the expression of which correlates to the capability of an oocyte to yield a viable pregnancy (“pregnancy signature”)

### DETAILED DESCRIPTION OF THE INVENTION

[0019] Prior to discussing the invention in more detail, the following definitions are provided. Otherwise all words and phrases in this application are to be construed by their ordinary meaning, as they would be interpreted by an ordinary skilled artisan within the context of the invention.

“Pregnancy-competent oocytes”: refers to a female gamete or egg that when fertilized by natural or artificial means is capable of yielding a viable pregnancy when it is comprised in a suitable uterine environment.

[0020] “Viable-pregnancy”: refers to the development of a fertilized oocyte when contained in a suitable uterine environment and its development into a viable fetus, which in turn develops into a viable offspring absent a procedure or event that terminates said pregnancy.

[0021] “Cumulus cell” refers to a cell comprised in a mass of cells that surrounds an oocyte. These cells are believed to be involved in providing an oocyte nutritional and or other requirements that are necessary to yield an oocyte which upon fertilization is “pregnancy competent”.

“Differential gene expression” refer to genes the expression of which varies within a tissue of interest; herein preferably a cell from an oocyte, e.g., a cumulus cell.

“Real Time RT-PCR”: refers to a method or device used therein that allows for the simultaneous amplification and quantification of specific RNA transcripts in a sample.

“Microarray analysis”: refers to the quantification of the expression levels of specific genes in a particular sample, e.g., tissue or cell sample.

[0022] “Pregnancy signature”: refers to a phrase coined by the inventors which refers to the characteristics levels of expression of a set of one or more genes, preferably at least 5, more preferably at least 10 to 20 genes, and still more preferably, at least 50 to 100 genes, that are expressed at characteristic levels in oocyte cells, preferably cumulus cells, that surround “pregnancy competent” oocytes. This is intended to encompass the level at which the gene is expressed and the distribution of gene expression within cells analyzed.

“Pregnancy signature gene”: refers to a gene which is expressed at characteristic levels by a cell, e.g., cumulus cell, on a “pregnancy competent” oocyte.

“IVF”: refers to in vitro fertilization.

“Zona pellucida” refers to the outermost region of an oocyte.

[0023] “Method for detecting differential expressed genes” encompasses any known method for evaluating differential gene expression. Examples include indexing differential display reverse transcription polymorase chain reaction (DDRT-PCR; Mahadeva et al, 1998, J. Mol. Biol. 284:1391-1318; WO 94/01582; subtractive mRNA hybridization (See Advanced Mol. Biol.; R. M. Twyman (1999) Bios Scientific Publishers, Oxford, p. 334, the use of nucleic acid arrays or microarrays (see Nature Genetics, 1999, vol. 21, Suppl. 1061) and the serial analysis of gene expression.

[0024] (SAGE Valculesev et al, Science (1995) 270:484-487) and real time PCR (RT-PCR). For example, differential levels of a transcribed gene in an oocyte cell can be detected by use of Northern blotting, and/or RT-PCR.

[0025] Preferably, the “pregnancy signature” genes will be detected by hybridization of RNA or DNA to DNA chips, e.g., filter arrays comprising cDNA sequences or glass chips containing cDNA or in situ synthesized oligonucleotide sequences. Filtered arrays are typically better for high and medium abundance genes DNA chips can detect low abundance genes.

[0026] Alternatively, polypeptide arrays comprising the polypeptides encoded by pregnancy signature genes or antibodies that bind thereto may be produced and used for diagnosis.

[0027] As noted above, the present invention preferably provides a novel method of detecting whether a female subject, human or non-human, produces “pregnancy competent” oocytes. The method involves detecting the levels of expression of one or more genes that are expressed or not expressed at characteristic levels by cumulus cells associated with (surrounding) oocytes that are “pregnancy competent”, i.e., which when fertilized by natural or artificial means (IVF), and transferred into a suitable uterine environment are capable of yielding a viable pregnancy, i.e., embryo that develops into a viable fetus and eventually an offspring unless the pregnancy is terminated by some event or procedure, e.g., a surgical or hormonal intervention.

[0028] In preferred embodiments, the invention will be used to identify women subjects who produce or do not produce pregnancy competent oocytes. However, the inventive methods are applicable to non-human animals as well, e.g., other mammals, avians, amphibians, reptiles, et al. For example, the subject invention may be used to derive animal models for the study of putative female fertility treatments.

[0029] Additionally, the present invention may be used to identify female subjects who have an abnormality that precludes or inhibits their ability to produce pregnancy competent oocytes, e.g., ovarian dysfunction, ovarian cyst, pre-menopausal or menopausal condition, cancer, autoimmune disorder, hormonal dysfunction, cell proliferation disorder, or another health condition that inhibits or precludes the development of pregnancy competent oocytes.

[0030] For example, subjects who do not express specific pregnancy signature genes at characteristic expression levels will be screened to assess whether they have an underlying health condition that precludes them from producing pregnancy competent oocytes. Particularly, such subjects will be screened to assess whether they are exhibiting signs of menopause, whether they have a cancer, autoimmune disease or ovarian abnormality, e.g., ovarian cyst, or whether they have another health condition, e.g., hormonal disorder, allergic disorder, etc., that may preclude the development of “pregnancy competent” oocytes.

[0031] Additionally, the subject methods may be used to assess the efficacy of putative female fertility treatments in humans or non-human female subjects. Essentially, such methods will comprise treating a female subject, preferably a woman, with a putative fertility enhancing treatment, isolating at least one oocyte from said woman after treatment, optionally further isolating at least one oocyte prior to treatment, isolating at one cumulus cell from each of said isolated oocytes; detecting the levels of expression of at least one gene that is expressed or not expressed at characteristic levels by cumulus cells that are associated with (surround) pregnancy competent oocytes; and assessing the efficacy of said putative fertility treatment based on whether it results in cumulus cells that express at least one pregnancy signature gene at levels more characteristic of cumulus cells that surround pregnancy competent oocytes (than without treatment). As noted, while female human subjects are preferred, the subject methods may be used to assess the efficacy of putative fertility treatments in non-human female animals, e.g., female non-human primates or other suitable animal models for the evaluation of putative human fertility treatments.

[0032] Still further, the present invention may be used to enhance the efficacy of in vitro or in vivo fertility treatments. Particularly, oocytes that are found to be “pregnancy incompetent”, or are immature, may be cultured in one or more gene products that are encoded by “pregnancy signature” genes, e.g., hormones, growth factors, differentiation factors, and the like, prior to, during, or after in vivo, or in vitro fertilization. Essentially, these gene products should supplement for a deficiency in nutritional gene products that are ordinarily expressed by cumulus cells that surround “pregnancy competent” oocytes, and which normally nurture oocytes and thereby facilitate the capability of these oocytes to yield viable pregnancies upon fertilization.

[0033] Alternatively, one or more gene products encoded by said pregnancy signature genes may be administered to a subject who is discovered not to produce pregnancy competent oocytes according to the methods of the invention. Such administration may be parenteral, e.g., by intravenous, intramuscular, subcutaneous injection or by oral or transdermal administration. Alternatively, these gene products may be administered locally to a target site, e.g., a female ovarian or uterine environment. For example, a female subject may have her uterus or ovary implanted with a drug delivery device that provides for the sustained delivery of one or more gene products encoded by “pregnancy signature” genes.

[0034] Thus, in general, the present invention involves the identification and characterization, in terms of gene identity and relative abundance, of genes that are expressed by cumulus cells derived from an egg, preferably human egg, at the time of ovulation, preferably cumulus cells, the expression levels of which correlate to the capability of said egg to give rise to a viable pregnancy upon natural or artificial fertilization and transferal to a suitable uterine environment. Preferably, at least 50 to 100 genes that are significantly upregulated or downregulated, by cumulus cells that correlate to the “pregnancy competency” of an oocyte from which said cumulus cells are associated with will be chosen and monitored in the inventive genetic testing methods.

[0035] However, while the invention preferably will select at least 50-100 genes from each of said categories, it is anticipated that the inventive methods alternatively may be practiced by monitoring the expression levels of fewer numbers of cumulus cell expressed genes, wherein said genes are similarly selected to be those which correlate to cumulus cells associated with “pregnancy competent” oocytes, i.e., those that are capable of yielding viable pregnancies.

[0036] According to the invention, gene expression levels will preferably be detected by real time RT-PCR. However other known methods, preferably real time detection methods such as mentioned above may be used to detect gene expression. Methods for detecting relative gene expression levels are known in the art and well within the purview of the ordinary skilled artisan.

[0037] In the inventive methods, cumulus cells will be isolated from oocytes of different female subjects, the oocytes fertilized by known IVF procedures, and the cumulus cells of the corresponding isolated oocytes being subjected to gene expression analysis, i.e., by isolation of total RNA therefrom, amplification of said total RNA, quantification of the relative gene expression levels of said RNAs by microarray analysis and RT-PCR, and the identification of genes, the expression of which correlates to oocytes that give rise to a viable pregnancy.

[0038] To effect such identification, as a separate step, the status of embryos fertilized with oocytes derived from each of said cumulus cell samples will be monitored and pregnancy data recorded. Particularly, the relative birth rate and the health status of the newborn for each oocyte will be recorded and the gene expression levels of cumulus cells associated with each oocyte assessed as a function of pregnancy rate, newborn health, among other parameters, e.g., gender. Based on these results, a set of genes the expression of which correlates to pregnancy/health outcome or gender will be identified. ‘pregnancy signature”)

[0039] This set of genes, and the corresponding expression levels is referred to herein as the “pregnancy signature” because these gene expression levels correlate to the development of a viable pregnancy and ultimately the production of a healthy newborn. While this “pregnancy signature” may comprise as many as 50, 100 or even 200 genes, it is anticipated that a fewer number of genes, e.g., on the order of 20 or less genes, may be sufficient to develop a suitable “pregnancy signature”.

[0040] The genes which constitute the “pregnancy signature” may include genes which encode gene products that are involved in the nutritional and developmental requirements of the oocyte, i.e., maturation and development, and the potential of the oocyte to be capable of yielding a viable pregnancy. These gene products may include growth factors, hormones, transcription factors, differentiation promoting agents, and the like. After the “pregnancy signature” is obtained, the corresponding genes are sequenced, the DNA sequences are then used to deduce the identify the corresponding polypeptide sequences, and these sequences then compared to databases of available human or other gene sequences to identify the identity of the gene products that correlate to the ability of an oocyte to yield a viable pregnancy. Genes which are differentially expressed by human oocytes are identified infra and contain such pregnancy signature genes. Further statistical analysis of the relative levels of expression of these genes, or subsets of such genes, will identify preferred subsets of these genes that constitute a “pregnancy signature” of a viable oocyte, i.e., one that is pregnancy competent.

[0041] As noted previously, these polypeptide gene products deficient in pregnancy incompetent oocytes may be added to in vitro culture media containing oocytes in order to enhance their pregnancy competency or alternatively may be administered in vivo as part of a fertility treatment regimen.

[0042] While the invention has been described in detail, the following example is provided to further illustrate the invention and its preferred embodiments.

### EXAMPLE

Description

[0043] Phase I: At the clinic, embryologists will remove the cumulus cells of two eggs and fertilize them. Embryos will be transferred to the uterus of a woman and cumulus cells sent to the laboratory for analysis. Once the cells arrive to the laboratory, RNA will be isolated and microarray analysis performed using Affymetrix platform. Pregnancy tests will be done by ultrasound on day 30 and embryonic sacs counted. There will be three kinds of outcomes: 1) 0 sacs; 2) 1 sac and 3) 2 sacs. A minimum of 30 volunteer women will participate during this phase. Ten with no sacs, ten with one sac and ten with 2 sacs. Pregnancy data will be correlated with gene expression obtained from the cumulus cells isolated from those same eggs. One hundred genes that directly correlate with pregnancy—either by upregulation or downregulation—will be further analyzed using real time RT-PCR. The best 20 genes that correlate with pregnancy (positively or negatively) will be called “pregnancy signature” and used for later testing at the clinic.

[0044] Phase II: Blind validation of genes in the pregnancy signature. At the clinic, the embryologist will isolate RNA from cumulus cells from each oocyte that will be later fertilized. Half of the RNA will be sent to our laboratory and the rest will be used for real time RT-PCR analysis to be performed on site. Gene expression of the “pregnancy signature” will be measured. Embryologists will transfer embryos without knowing the outcome of gene expression analysis. One hundred women will be asked to participate as volunteers in this part of the study. At the time pregnancy results are obtained, the study will be unmasked and results from each individual will be correlated with gene expression analysis. We anticipate that the “pregnancy signature” put forward in phase 1 will be validated during this phase.

[0045] Alternative strategy: In the event of an unexpected outcome i.e., the pregnancy signature is not validated; microarray analysis will be run once more using the RNA provided by the clinic in phase 2. It is anticipated that having 100 more samples will result in the identification of a clear pattern of gene expression in cumulus cells from eggs capable (or non-capable) of generating a healthy pregnancy/baby.

[0046] Using microarray analysis as described above, the genes identified infra were found to be differentially expressed by cumulus cells obtained from eggs of women donors. The expression of those particular genes which correlate to pregnancy (positive or negative) will establish a “pregnancy signature”, i.e., genes the expression or absence of expression of which correlates to a positive pregnancy outcome and “infertility signature”, i.e., specific genes the expression or absence of expression correlate to fertility problems or abnormalities.

[0047] This is effected preferably by microarray analysis. For example, comparison of expression between two samples on filter arrays may be performed by comparing nucleic acids obtained from normal oocyte cells to those obtained from a donor suspected of having ovarian dysfunction that renders oocytes pregnancy incompetent on two duplicate filters or alternatively a single filter may be used that is stripped and hybridized sequentially.

[0048] Direct comparison of gene expression in two samples can be achieved on glass arrays by labeling the two samples with different flourophores. This technique allows the evolution of repression of gene expression as well as induction of expression. The two flouresently-labeled cDNAs are then mixed and hybridized on a single glass or filter array. Glass arrays have the advantage of allowing the simultaneous analysis of two samples on the same array under the same hybridization conditions.

[0049] Gene arrays containing sequences of genes implicated in pregnancy (“pregnancy signature”) will allow high-throughput screening of individuals for diagnostic purposes or tailor-made treatments.

[0050] Arrays of polynucleotides, the expression of which corresponds to, or are complementary to the sequences of genes identified by the method of the invention therefore provide a further aspect of the invention. Such an array will include at least two nucleic acid sequences, preferably at least 10, and more preferably at least 20, e.g., 50 genes or more that correspond to the sequence of, or are complementary to genes, the expression of which (positive or negative) the positive pregnancy outcome in cells obtained from oocyte donors, e.g., women suspected to have ovarian dysfunction as a result of disease, age, and the like. Protein arrays form a further aspect of the invention and will contain polypeptides encoded by such pregnancy signature genes or antibodies which bind thereto.

[0051] Recent developments in the field of protein and antibody arrays allow the simultaneous detection of a large number of proteins.

The application's sequence listing, which the Patent Office published only in electronic form, follows.

SEQUENCE LISTING (513 sequences)

SEQ ID NO: 1 - DNA, 870 bp, Homo sapiens
  modified_base (9)..(9): a, c, g, or t
  modified_base (99)..(99): a, c, g, or t
  modified_base (103)..(103): a, c, g, or t
  modified_base (106)..(107): a, c, g, or t
  modified_base (109)..(109): a, c, g, or t
  modified_base (112)..(114): a, c, g, or t
  modified_base (116)..(117): a, c, g, or t
  modified_base (119)..(119): a, c, g, or t
  modified_base (121)..(130): a, c, g, or t
  modified_base (840)..(870): a, c, g, or t
gcttttgtntccggtgagttttgtggcgggaagcttctgcgctggtgcttagtaaccgactttcctccggactcctgcacgacctgctcctacagccgngcgntcnncnccnnngnngntnnnnnnnnnnggtccagaggcctttcagaaggagaaggcagctctgtttctctgcagaggagtagggtcctttcagccatgaagcatgtgttgaacctctacctgttaggtgtggtactgaccctactctccatcttcgttagagtgatggagtccctagagggcttactagagagcccatcgcctgggacctcctggaccaccagaagccaactagccaacacagagcccaccaagggccttccagaccatccatccagaagcatgtgataagacctccttccatactggccatattttggaacactgacctagacatgtccagatgggagtcccattcctagcagacaagctgagcaccgttgtaaccagagaactattactaggccttgaagaacctgtctaactggatgctcattgcctgggcaaggcctgtttaggccggttgcggtggctcatgcctgtaatcctagcactttgggaggctgaggtgggtggatcacctgaggtcaggagttcgagaccagcctcgccaacatggcgaaaccccatctctactaaaaatacaaaagttagctgggtgtggtggcagaggcctgtaatcccagctccttgggaggctgaggcgggagaattgcttgaacccggggacggaggttgcagtgagccgagatcgcactgctgtacccagcctgggccacagtgcaagactccatctcnnnnnnnnnnnnnnnnnnnnnnnnnnnnnnn

SEQ ID NO: 2 - DNA, 1107 bp, Homo sapiens
  modified_base (641)..(641): a, c, g, or t
tccaaaaaaataaagctctcagggagacatgaataaaatcaatgaacattagaaaataaaatatagatgcttaccattaacctaccaactcttaatatccttaaattatgtgatatataaagaggactgttacttttttactttttttttttttttttttttggctttgctttatttatttgtagttgggggctaacgttttctcttttctttctattgatcctgttgtggttgggtttcctgtggagagagtagtttgtcctgttgcactagaacattatttactcactaaattgagtttttcagtcaattaacaaatatttattaagttcctactatgtaccaggcatagtagggctacaatggtaagcaagacagagtccctgcccccaaagagcttatattctaatggggatattaagggatgaatagaataccaatgtgtgcactgtacaggaatcatactatttaaaaataatttgtataaactataatgcttagcacagatggcgagttatctgtgctatgtgaaagctgtgaaatagtgctctaagagttgtcaagagctgtggttttacatcttttcctcattgcaaatttagtgactttctacacactatatggaaataaatgactagcanataaaacagtcataaatacaaagcagaggttgcactcccccaatcccgagttaacccaggtctgcaataacaccatgttaaaggtgcagatagagacttggctcaaaaaggcttggagatgaggaagattggaatataatgatggttttgtctgttccttaactaaagtgcctctatgtatattcttttctatttgtagcaggataaatttggtctggctcagttttggaactgtattttgaaaatggctttgtcttacagtttaaggaatagacaggtggagggaaagtcacataaaggagcaagtttgtgtagctgtccctcttgccccttttaatcatcctcctttgatatggccatcctggtgggcctcctttgccatttccatttttggtttctttccctgaaaactgtgtgcaggtaattccatgtgccattgttgaaaagaaaaaaaaaaaaagaaaaa

SEQ ID NO: 3 - DNA, 5468 bp, Homo sapiens
  modified_base (8)..(8): a, c, g, or t
  modified_base (717)..(717): a, c, g, or t
  modified_base (719)..(720): a, c, g, or t
  modified_base (771)..(771): a, c, g, or t
  modified_base (784)..(784): a, c, g, or t
  modified_base (823)..(823): a, c, g, or t
  modified_base (834)..(834): a, c, g, or t
  modified_base (836)..(836): a, c, g, or t
  modified_base (847)..(847): a, c, g, or t
  modified_base (860)..(860): a, c, g, or t
  modified_base (873)..(873): a, c, g, or t
  modified_base (875)..(875): a, c, g, or t
  modified_base (886)..(886): a, c, g, or t
  modified_base (888)..(888): a, c, g, or t
  modified_base (899)..(899): a, c, g, or t
  modified_base (927)..(927): a, c, g, or t
  modified_base (934)..(934): a, c, g, or t
  modified_base (965)..(965): a, c, g, or t
  modified_base (967)..(967): a, c, g, or t
  modified_base (978)..(978): a, c, g, or t
  modified_base (980)..(980): a, c, g, or t
  modified_base (1147)..(1147): a, c, g, or t
  modified_base (1149)..(1149): a, c, g, or t
  modified_base (1160)..(1160): a, c, g, or t
  modified_base (1173)..(1173): a, c, g, or t
  modified_base (1175)..(1175): a, c, g, or t
  modified_base (1186)..(1186): a, c, g, or t
  modified_base (1513)..(1513): a, c, g, or t
  modified_base (1649)..(1649): a, c, g, or t
  modified_base (1651)..(1653): a, c, g, or t
  modified_base (2170)..(2170): a, c, g, or t
  modified_base (2258)..(2258): a, c, g, or t
  modified_base (2260)..(2260): a, c, g, or t
  modified_base (2658)..(2659): a, c, g, or t
  modified_base (2661)..(2662): a, c, g, or t
  modified_base (2664)..(2669): a, c, g, or t
  modified_base (2671)..(2676): a, c, g, or t
  modified_base (2679)..(2680): a, c, g, or t
  modified_base (2683)..(2689): a, c, g, or t
  modified_base (2696)..(2698): a, c, g, or t
  modified_base (2700)..(2702): a, c, g, or t
  modified_base (2704)..(2704): a, c, g, or t
  modified_base (2706)..(2706): a, c, g, or t
  modified_base (3128)..(3128): a, c, g, or t
  modified_base (3909)..(3911): a, c, g, or t
  modified_base (3922)..(3922): a, c, g, or t
  modified_base (3932)..(3932): a, c, g, or t
  modified_base (3944)..(3944): a, c, g, or t
  modified_base (4046)..(4046): a, c, g, or t
  modified_base (4058)..(4058): a, c, g, or t
  modified_base (4112)..(4112): a, c, g, or t
  modified_base (4690)..(4691): a, c, g, or t
  modified_base (5386)..(5387): a, c, g, or t
  modified_base (5435)..(5436): a, c, g, or t
tttttttnttttttttttttttttttttctttaaatagttcacatttattattgataacaataaaaaaatcttttaaagactatcagtattgtattaccaagtgaggtaatatgtttacaaaacatttacagaatttgatatgcaaataacaaatttaggaaggaaagtgaattaagacataatagagggagaatcaaagaatcattagtactaagaaatgggaaatgacagcagcgttttaaaagagtggcaaggtactaaaggtagaaacacgatgcaaactgcatactcaaaccatagctgccccagaattcccttacaaggggagtgagattggattactcgggaggaaaccctgtaagcatttgtgcggtcatgtgctttgagctcttcaagatgcactacagtctttgggtataaaagaatgccactcccgaatcaacttaaaaagaacagatcttcagcctgggagggggcaggggatggctgcaattcaaacagttctataaacatctctgggcacatgaggactgttgagtgaagcattttcttggcagctgtcagcaaaatcgccatctgagacacagagaaagagaaagagaaagcagggaccaccttcaggcccttgtgatttgggaacaggaagcaccaggtggaagcagcacagacgcgctactaaccctacctacgaaccctacctacgaaccctacctacnanncctacctactagccctacctactagccctacctactagccctacctactanccctacctactanccctacctactagccctacctactagccctacctactanccctacctacnanccctacctacnaaccctacctacnaaccctacctacnanccctacctacnanccctacctacnaaccctacctactagccctacctactanccctacnctactagccctacctactaaccctacctacnanccctacctacnanccctacctactaaccctacctactagccctacctactagccctacctactaaccctacctactagccctacctacgaaccctacctactagccctacctactaaccctacctaccagccctacctacgaaccctacctactaaccctacctactagccctacctacnanccctacctacnaaccctacctacnanccctacctacnaaccctacctactagccctacctactaaccctacctaccagccctacctacgaaccctacctactaaccctacctactagccctacctactagccctacctactaaccctacctactagccctacctacgaaccctaccgcgctttccggaagcaaaggcttcaggtaccactgaggagctcgatctctaagagcaaacacaaatgtggtccaaaggcaggtgatcacagcacaggccctgggacgtctacagtgtgcaggcagccactagggctgacccgaccgggcaagagggctgctcggtccctcccccgccctcctgatccntgcacggggcacacatggcctccacacagctctccagtcacgcagcacccacacagtgccttcagagcggagctgagacggcacaaccaggatctccatgcctaccacgcacacagttgacagccgcgtggggttngnnntgaaaaacacggcctctgctgcacacagaaacacgtgttgcatgtccttatcgtggaggccatcccctatgcaacttctggacagattctcaaataacctgcttttcccataaaaagctgaaaaaataagggcctgtaccagatagagcaggctttaaaatcaggaattaaacaaaatgtaaaaggcaaacaaatcccatattctgatttgcttctgtgaagattccttcattactcaaactaagtttccactcaccccgtccccccagcacccccaccgtcatgcacacatgcacacacacagcacatgcacacacacacacgcatgagtccacaattcccatgtacaaagaagcaggactcctacatgccacacgccaccctgaagtggatgcgagagctgctgcttagctactaataaaaccccatggacagtgtcaagtggcaaatgcgacttgctggttccaagacggcctcctagtggctggaactgtctgggctctgagacaatgagccnccagagggcacagaggagatggcctacactgggctgggagctgactgcaggtgagaggggcgacgcacggaaggaaacgggaagaacncncccacccaagttcacatacagaaaaatcctgctctaaaaagtatcaaaaagatttgaaaaggaggaaagagaaagtaatgtttaacgatggcagcattttcctggagtcaccaggagtccctgagagcccctcctgagcccccggccccactgcagacagtgggtggtgtgggtgtgtctggccctgggacaaggtactccgcaggcaacctctgaatcctcagaggataaggacctcaagggctggccctaagtccacagaccatcttgactggcgggaagcatgggggccgtgaggcggcgtgcgggccatgaggcagcttgggggaagcgagctggcagcttccgtcccaggtgaggaggggccatctctggaggatgtcacaggaattcattcnntnntnnnnnntnnnnnnttnnttnnnnnnnttttttnnntnnntntntgagaccacgtcaatcctttaattggtacagaaactacttttctttcaagagagcccttgcgctctggttggattttgtgcacaacgtatacaaaatctatggctattgagttaagttaggatcagagttaaaactacctgccaaggtagttttgggatcaaacgactacgtttaccatctgagagctatttgctatctagaggtgagaggagtctgtacaatgtcgccgctgggtgggcgggtgcagctggctgtccgaggaggggcggccgtcccctctgcacactaggtgcaggcagcgcggcactacctggagatcatggagctggagtgggactggctggaggaggtggtggcggcactcagctgggagaagccgctgtggctggactccaggctcgtcatggaacctctgaaatcnctccgagccgatcacctcggtgtagtacatcactttacacttgtgcgaagagacctgcagggacgcaagcacgtcgtccacccggggaaggctgctggcggcgcacgcaggcatgctgtggaatttccactgcaggatgtagaagcccggccacctggtcacatgggaaccctgcacgctttctccttctttgcagatcagaggcgactccaccatgctgtagtcgcggcccagctgccagactttgtctatgagctgcacattgttcccacccggagaggtgatgctgtgggctcccagggagtcctttttgggtggttgtggcgacctcttggagtgatagatgttaaacacaatgtcccctttgcacacgtcgaaatcccaagtgatgactgacgaggcatccacaatctgaatgagaatctcatgtggggctcctttgaagacgcttgcagactggtagatggtctcagtccagagcttcaggtcttcgttctccagctcctctgcagtccggtacagagatttggggaccagtccaccctctggcacttcgcacatgcactccccactcaggaaatctggaataatctctttgtcgatgtaatccagcaggcctccaggaccctggtagtcatttcctgcataaatgaggaacttccttctggtgttgtcatcaatgaacggactaaccagcgtccagagcacaggaaataccctgggcgcccgcaggatgagaaggcggcccagtgtctcagggtagttggcctccaccacctcnnntgatccgcagncagcgctttncacaccaggtcnccacaagtggcgcatgttcagcccttccaagtccaccaggcaggtccatgagctgataggccgaccaaagacttttgtattctcttcgcatcgccttagccnttcttcatttanggagagaacgtatctcagcagggcttcctccccgagcgctctcaccaagccttnggtgtccatctgccccagcctgagcacgtagaggggccgcccatctttgtcgtgatgatgccagcctcccgcgtagtaatcctgaaggacctgaggaggggtccaggtttcaagaatgtagtctacctgatgctgctttctccacgtcaaagactgacacatgatctctctggctttgtcaatattaaaatcccgtgcacggaggaaccgaagaatatgctcatcttttggaattttgcccttgtgggtctcctggagccactggcgaagtctaatgaggcagctctcctgcagcggagtcaaatcgcccaggtatctcttgatgtagtcggcatctagtttgtcgtcaggggtgcccaccacgggctcaggtgcactggggctgctgagggcatcaccactcagcccctccttgagggcagcttctgggatgacgacggccatggacgctgcttgtttcttggaggatgatgaagatgtctctgaagagggcgtgatggaaggcggactccaacggggcacaaaggttatgccttcttcttctaattggcgaaggtagtattcgatgatttcctttnnttttttaatgttgctggtatattgtttcattgcaattttttccactgtactttcaaaaccaaagaaagatttaatatctaaacttgcagactgttcaaaacaggtccaatcttcattttcagggtgaacggtgtagcagcaatgctcattaatgatgacccgattggaaaacgtttcattataagcctcaatgtgcaaagtacgttcccgagaattcagtgagtttttctggacaaaataaacataatcaactcctgcaatcttcttcagcagtctgggtgcatctacatccagcttgcagcgcctttcaatgacatgaatagccccatcttcgctcttgaattcattcacagtgtcactgcccacgaacatcggaatcaaaggacatgtagggaacctcctttcataggcagccataattaattcaaaggggtatttgtacaccctcactggggactggtatttctgcaccatgattgcaatacaacagcaaccctctcacacctgtcttgttgaggataatcattaagaatggtactttatgctgaacatggtgagaggatattcaaacatacaaaactgaatatcctcaaggagcccgaagtctagctcttgtcagaaaggccgggcctgggacacggggtggcgaggggcgctcataccggcggctccgcggggcagtctcggttccactnntccgcgaccgtagctcgaccgccggttccggggagggggccggggagnngggagggggaaggggcgcggcgacggcacttg

SEQ ID NO: 4 - DNA, 1639 bp, Homo sapiens
agcagagcacacaagcttctaggacaagagccaggaagaaaccaccggaaggaaccatctcactgtgtgtaaacatgacttccaagctggccgtggctctcttggcagccttcctgatttctgcagctctgtgtgaaggtgcagttttgccaaggagtgctaaagaacttagatgtcagtgcataaagacatactccaaacctttccaccccaaatttatcaaagaactgagagtgattgagagtggaccacactgcgccaacacagaaattattgtaaagctttctgatggaagagagctctgtctggaccccaaggaaaactgggtgcagagggttgtggagaagtttttgaagagggctgagaattcataaaaaaattcattctctgtggtatccaagaatcagtgaagatgccagtgaaacttcaagcaaatctacttcaacacttcatgtattgtgtgggtctgttgtagggttgccagatgcaatacaagattcctggttaaatttgaatttcagtaaacaatgaatagtttttcattgtaccatgaaatatccagaacatacttatatgtaaagtattatttatttgaatctacaaaaaacaacaaataatttttaaatataaggattttcctagatattgcacgggagaatatacaaatagcaaaattgagccaagggccaagagaatatccgaactttaatttcaggaattgaatgggtttgctagaatgtgatatttgaagcatcacataaaaatgatgggacaataaattttgccataaagtcaaatttagctggaaatcctggatttttttctgttaaatctggcaaccctagtctgctagccaggatccacaagtccttgttccactgtgccttggtttctcctttatttctaagtggaaaaagtattagccaccatcttacctcacagtgatgttgtgaggacatgtggaagcactttaagttttttcatcataacataaattattttcaagtgtaacttattaacctatttattatttatgtatttatttaagcatcaaatatttgtgcaagaatttggaaaaatagaagatgaatcattgattgaatagttataaagatgttatagtaaatttattttattttagatattaaatgatgttttattagataaatttcaatcagggtttttagattaaacaaagaaacaattgggtacccagttaaattttcatttcagataaacaacaaataattttttagtataagtacattattgtttatctgaaagttttaattgaactaacaatcctagtttgatactcccagtcttgtcattgccagctgtgttggtagtgctgtgttgaattacggaataatgagttagaactattaaaacagccaaaactccacagtcaatattagtaatttcttgctggttgaaacttgtttattatgtacaaatagattcttataatattatttaaatgactgcatttttaaatacaaggctttatatttttaactttaagatgtttttatgtgctctccaaattttttttactgtttctgattgtatggaaatataaaagtaaatatgaaacatttaaaatataatttgttgtcaaagtaaaaaaaaaaaaaaa

SEQ ID NO: 5 - DNA, 424 bp, Homo sapiens
  modified_base (40)..(40): a, c, g, or t
atgtctcttgtcagctgtctttcagaagacctggtggggnaagtccgtgggcatcatgttgaccgagctggagaaagccttgaactctatcatcgacgtctaccacaagtactccctgataaaggggaatttccatgccgtctacagggatgacctgaagaaattgctagagaccgagtgtcctcagtatatcaggaaaaagggtgcagacgtctggttcaaagagttggatatcaacactgatggtgcagttaacttccaggagttcctcattctggtgataaagatgggctggcagcccacaaaaaaagccatgaagaaagccacaaagagtagctgagttactgcccagaggctgggcccctgacatgtacctgcagaataataaagtcatcaatacctcaaaaaaaaaaaaaaaaaaaaa

SEQ ID NO: 6 - DNA, 576 bp, Homo sapiens
actcttctggtccccacagactcagagagaacccaccatggtgctgtctcctgccgacaagaccaacgtcaaggccgcctggggtaaggtcggcgcgcacgctggcgagtatggtgcggaggccctggagaggatgttcctgtccttccccaccaccaagacctacttcccgcacttcgacctgagccacggctctgcccaggttaagggccacggcaagaaggtggccgacgccctgaccaacgccgtggcgcacgtggacgacatgcccaacgcgctgtccgccctgagcgacctgcacgcgcacaagcttcgggtggacccggtcaacttcaagctcctaagccactgcctgctggtgaccctggccgcccacctccccgccgagttcacccctgcggtgcacgcctccctggacaagttcctggcttctgtgagcaccgtgctgacctccaaataccgttaagctggagcctcggtggccatgcttcttgccccttgggcctccccccagcccctcctccccttcctgcacccgtacccccgtggtctttgaataaagtctgagtgggcggc

SEQ ID NO: 7 - DNA, 3025 bp, Homo sapiens
gcacgagcaggcagttcagattaaagaagctaattgatcaagaaatcaagtctcaggaggagaaggagcaagaaaaggagaaaagggtcaccaccctgaaagaggagctgaccaagctgaagtcttttgctttgatggtggtggatgaacagcaaaggctgacggcacagctcacccttcaaagacagaaaatccaagagctgaccacaaatgcaaaggaaacacataccaaactagcccttgctgaagccagagttcaggaggaagagcagaaggcaaccagactagagaaggaactgcaaacgcagaccacaaagtttcaccaagaccaagacacaattatggcgaagctcaccaatgaggacagtcaaaatcgccagcttcaacaaaagctggcagcactcagccggcagattgatgagttagaagagacaaacaggtctttacgaaaagcagaagaggagctgcaagatataaaagaaaaaatcagtaagggagaatatggaaacgctggtatcatggctgaagtggaagagctcataaaaatggaggagcagtgcagagatctcaataagaggcttgaaagggagacgttacagagtaaagactttaaactagaggttgaaaaactcagtaaaagaattatggctctggaaaagttagaagacgctttcaacaaaagcaaacaagaatgctactctctgaaatgcaatttagaaaaagaaaggatgaccacaaagcagttgtctcaagaactggagagtttaaaagtaaggatcaaagagctagaagccattgaaagtcggctagaaaagacagaattcactctaaaagaggatttaactaaactgaaaacattaactgtgatgtttgtagatgaacggaaaacaatgagtgaaaaattaaagaaaactgaagataaattacaagctgcttcttctcagcttcaagtggagcaaaataaagtaacaacagttactgagaagttaattgaggaaactaaaagggcgctcaagtccaaaaccgatgtagaagaaaagatgtacagcgtaaccaaggagagagatgatttaaaaaacaaattgaaagcggaagaagagaaaggaaatgatctcctgtcaagagttaatatgttgaaaaataggcttcaatcattggaagcaattgagaaagatttcctaaaaaacaaattaaatcaagactctgggaaatccacaacagcattacaccaagaaaacaataagattaaggagctctctcaagaagtggaaagactgaaactgaagctaaaggacatgaaagccattgaggatgacctcatgaaaacagaagatgaatatgagactctagaacgaaggtatgctaatgaacgagacaaagctcaatttttatctaaagagctagaacatgttaaaatggaacttgctaagtacaagttagcagaaaagacagagaccagccatgaacaatggcttttcaaaaggcttcaagaagaagaagctaagtcagggcacctctcaagagaagtggatgcattaaaagagaaaattcatgaatacatggcaactgaagacctaatatgtcacctccagggagatcactcagtctgcaaaaaaaaactaaatcaacaagaaaacaggaacagagatttaggaagagagattgaaaacctcactaaggagttagagaggtaccggcatttcagtaagagcctcaggcctagtctcaatggaagaagaatttccgatcctcaagtattttctaaagaagttcagacagaagcagtagacaatgaaccacctgattacaagagcctcattcctctggaacgtgcagtcatcaatggtcagttatatgaggagagtgagaatcaagacgaggaccctaatgatgagggatctgtgctgtccttcaaatgcagccagtctactccatgtcctgttaacagaaagctatggattccctggatgaaatccaaggagggccatcttcagaatggaaaaatgcaaactaaacccaatgccaactttgtgcaacctggagatctagtcctaagccacacacctgggcagccacttcatataaaggttactccagaccatgtacaaaacacagccactcttgaaatcacaagtccaaccacagagagtcctcactcttacacgagtactgcagtgataccgaactgtggcacgccaaagcaaaggataaccatcctccaaaacgcctccataacaccagtaaagtccaaaacctctaccgaagacctcatgaatttagaacaaggcatgtccccaattaccatggcaacctttgccagagcacagaccccagagtcttgtggttctctaactccagaaaggacaatgtccctattcaggttttggctgtgactggttcagctagctctcctgagcagggacgctccccagaaccaacagaaatcagtgccaagcatgcgatattcagagtctccccagaccggcagtcatcatggcagtttcagcgttcaaacagcaatagctcaagtgtgataactactgaggataataaaatccacattcacttaggaagtccttacatgcaagctgtagccagcccttcagcaccactgcaggataaccgaactcaaggcttaattaacggggcactaaacaaaacaaccaataaagtcaccagcagtattactatcacaccaacagccacacctcttcctcgacaatcacaaattacagtaagtaatatatataactgaccacgctcaccctcatccagtccatactgatatttttgcaaggaactcaatccttttttaatcatccctccatatcccccaagactgactgaactcgtactttgggaaggtttgtgcatgaactatacaagagtatctgaaactaactgttgcctgcatagtcatatcgagtgtgcacttactgtatatcttttcatttacatacttgtatggaaaatatttagtctgcacttgtataaatacatctttatgtatttgaaaaaaaaaaaa

SEQ ID NO: 8 - DNA, 4175 bp, Homo sapiens
tgaggagtcctgctcaagacacggtcactggatctgagaaacttcccaggggaccgcattccagagtcagtgactctgtgaagcacccacatctacctcttgccacgttcccacgggcttgggggaaagatggtggggaccaaggcctgggtgttctccttcctggtcctggaagtcacatctgtgttggggagacagacgatgctcacccagtcagtaagaagagtccagcctgggaagaagaaccccagcatctttgccaagcctgccgacaccctggagagccctggtgagtggacaacattgttcaacatcgactacccaggcgggaagggcgactatgagcggctggacgccattcgcttctactatggggaccgtgtatgtgcccgtcccctgcggctagaggctcggaccactgactggacacctgcgggcagcactggccaggtggtccatggtagtccccgtgagggtttctggtgcctcaacagggagcagcggcctggccagaactgctctaattacaccgtacgcttcctctgcccaccaggatccctgcgccgagacacagagcgcatctggagcccatggtctccctggagcaagtgctcagctgcctgtggtcagactggggtccagactcgcacacgcatttgcttggcagagatggtgtcgctgtgcagtgaggccagcgaagagggtcagcactgcatgggccaggactgtacagcctgtgacctgacctgcccaatgggccaggtgaatgctgactgtgatgcctgcatgtgccaggacttcatgcttcatggggctgtctcccttcccggaggtgccccagcctcaggggctgctatctacctcctgaccaagacgccgaagctgctgacccagacagacagtgatgggagattccgaatccctggcttgtgccctgatggcaaaagcatcctgaagatcacaaaggtcaagtttgcccccattgtactcacaatgcccaagactagcctgaaggcagccaccatcaaggcagagtttgtgagggcagagactccatacatggtgatgaaccctgagacaaaagcacggagagctgggcagagcgtgtctctgtgctgtaaggccacagggaagcccaggccagacaagtatttttggtatcataatgacacattgctggatccttccctctacaagcatgagagcaagctggtgctgaggaaactgcagcagcaccaggctggggagtacttttgcaaggcccagagtgatgctggggctgtgaagtccaaggttgcccagctgattgtcacagcatctgatgagactccttgcaacccagttcctgagagctatcttatccggctgccccatgattgctttcagaatgccaccaactccttctactatgacgtgggacgctgccctgttaagacttgtgcagggcagcaggataatgggatcaggtgccgtgatgctgtgcagaactgctgtggcatctccaagacagaggaaagggagatccagtgcagtggctacacgctacccaccaaggtggccaaggagtgcagctgccagcggtgtacggaaactcggagcatcgtgcggggccgtgtcagtgctgctgacaatggggagcccatgcgctttggccatgtgtacatggggaacagccgtgtaagcatgactggctacaagggcactttcaccctccatgtcccccaggacactgagaggctggtgctcacatttgtggacaggctgcagaagtttgtcaacaccaccaaagtgctacctttcaacaagaaggggagtgccgtgttccatgaaatcaagatgcttcgtcggaaagagcccatcactttggaagccatggagaccaacatcatccccctgggggaagtggttggtgaagaccccatggctgaactggagattccatccaggagtttctacaggcagaatggggagccctacataggaaaagtgaaggccagtgtgaccttcctggatccccggaatatttccacagccacagctgcccagactgacctgaacttcatcaatgacgaaggagacactttcccccttcggacgtatggcatgttctctgtggacttcagagatgaggtcacctcagagccacttaatgctggcaaagtgaaggtccaccttgactcgacccaggtcaagatgccagagcacatatccacagtgaaactctggtcactcaatccagacacagggctgtgggaggaggaaggtgatttcaaatttgaaaatcaaaggaggaacaaaagagaagacagaaccttcctggtgggcaacctggagattcgtgagaggaggctctttaacctggatgttcctgaaagcaggcggtgctttgttaaggtgagggcctaccggagtgagaggttcttgcctagtgagcagatccagggggttgtgatctccgtgattaacctggagcctagaactggcttcttgtccaaccctagggcctggggccgctttgacagtgtcatcacaggccccaacggggcctgtgtgcctgccttctgtgatgaccagtcccctgatgcctactctgcctatgtcttggcaagcctggctggggaggaactgcaagcagtggagtcttctcctaaattcaacccaaatgcaattggcgtccctcagccctatctcaacaagctcaactaccgtcggacggaccatgaggatccacgggttaaaaagacagctttccagattagcatggccaagccaaggcccaactcagctgaggagagcaatgggcccatctatgcctttgagaacctccgggcatgtgaagaggcaccacccagtgcagcccacttccggttctaccagattgagggggatcgatatgactacaacacagtccccttcaacgaagatgaccctatgagctggactgaagactatctggcatggtggccaaagccgatggaattcagggcctgctatatcaaggtgaagattgtggggccactggaagtgaatgtgcgatcccgcaacatggggggcactcatcggcggacagtggggaagctgtatggaatccgagatgtgaggagcactcgggacagggaccagcccaatgtctcagctgcctgtctggagttcaagtgcagtgggatgctctatgatcaggaccgtgtggaccgcaccctggtgaaggtcatcccccagggcagctgccgtcgagccagtgtgaaccccatgctgcatgagtacctggtcaaccacttgccacttgcagtcaacaacgacaccagtgagtacaccatgctggcacccttggacccactgggccacaactatggcatctacactgtcactgaccaggaccctcgcacggccaaggagatcgcgctcggccggtgctttgatggcacatccgatggctcctccagaatcatgaagagcaatgtgggagtagccctcaccttcaactgtgtagagaggcaagtaggccgccagagtgccttccagtacctccaaagcaccccagcccagtcccctgctgcaggcactgtccaaggaagagtgccctcgaggaggcagcagcgagcgagcaggggtggccagcgccagagtggagtggtggcctctctgagatttcctagagttgctcaacagcccctgatcaactaagttttgtggtacttcaccctcttctgccctcatttcatgtgacagccattgtgagactgatgcacaaactgtcacttggttaatttaagcacttctgttttcgtgaatttgcttgtttgtttcttcatgcctttacttactttgtcccatgctactgattggcacgtggcccccacaatggcacaataaagcccctttgtgaaactgttctttaaatgaaacacaagaaattggccactggtaaaactctgcagcttcaactgtacttcatttaatgccattaatgcaaatatacttcctcttctttttgcatggttttgcccacctctgcaatagtgataatctgatgctgaagatcaaataaccaatataaagcatatttcttggccttgctccacaggacataggcaagccttgatcatagttcatacatataaatggtggtgaaataaagaaataaaacacaatacttttactggaaaaaaaaaaaa

SEQ ID NO: 9 - DNA, 1547 bp, Homo sapiens
ggcacgagccagtctccgcgcctccacccagctcaggaacccgcgaaccctctcttgaccactatgagcctcccgtccagccgcgcggcccgtgtcccgggtccttcgggctccttgtgcgcgctgctcgcgctgctgctcctgctgacgccgccggggcccctcgccagcgctggtcctgtctctgctgtgctgacagagctgcgttgcacttgtttacgcgttacgctgagagtaaaccccaaaacgattggtaaactgcaggtgttccccgcaggcccgcagtgctccaaggtggaagtggtagcctccctgaagaacgggaagcaagtttgtctggacccggaagccccttttctaaagaaagtcatccagaaaattttggacagtggaaacaagaaaaactgagtaacaaaaaagaccatgcatcataaaattgcccagtcttcagcggagcagttttctggagatccctggacccagtaagaataagaaggaagggttggtttttttccattttctacatggattccctactttgaagagtgtgggggaaagcctacgcttctccctgaagtttacagctcagctaatgaagtactaatatagtatttccactatttactgttattttacctgataagttattgaaccctttggcaattgaccatattgtgagcaaagaatcactggttattagtctttcaatgaatattgaattgaagataactattgtatttctatcatacattccttaaagtcttaccgaaaaggctgtggatttcgtatggaaataatgttttattagtgtgctgttgagggaggtatcctgttgttcttactcactcttctcataaaataggaaatattttagttctgttttcttggggaatatgttactctttaccctaggatgctatttaagttgtactgtattagaacactgggtgtgtcataccgttatctgtgcagaatatatttccttattcagaatttctaaaaatttaagttctgtaagggctaatatattctcttcctatggttttagatgtttgatgtcttcttagtatggcataatgtcatgatttactcattaaactttgattttgtatgctattttttcactataggatgactataattctggtcactaaatatacactttagatagatgaagaagcccaaaaacagataaattcctgattgctaatttacatagaaatgtattctcttggttttttaaataaaagcaaaattaacaatgatctgtgctctgcaaagttttgaaaatatatttgaacaatttgaatataaattcatcatttagtcctcaaaatatatacagcattgctaagattttcagatatctattgtggatcttttaaaggttttgaccattttgttatgaggaattatacatgtatcacattcactatattaaaattgcacttttattttttcctgtgtgtcatgttggtttttggtacttgtattgtcatttggagaaacaataaaagatttctaaaccaaaaaaaaaaaaaaaaaaa

SEQ ID NO: 10 - DNA, 8992 bp, Homo sapiens
ctgaactagttgccagtgatcttgaaacgtgacagtaaccaagagataaataggtgacaatgacaggaaaattagatgtagtaaaagagagtgtttgagagcagaagctatggcaactaaagactggatttgaatccttcctagcttggtgacatgagcaaattacttgatttaagtgagcattttcccatctgtacagtggagataacgataattgtgcctgctaagaagaattgctgtgaagattagtgaaataatgcatgtaaaacatttggtacagtatgtgacacatagtacaaatagtttgctaggaagattgttattattcttcacttgtgatattgtgaagttttcatacagcaaattggacatcatgagatggattgattaaataaatagatttgaacttcaaggactggtagtgttcttgctttggaaagaagaaacttggtttatcctaataatagtaggataataatggtgaagtgataggtacaagtaatagtgtttatgatgcgctggtgatgataggaaaagaaagccattatatgggcaagagctagaagtaataaaatggtgcatttttcagtgatgtttggcctatgtagctattctctgataactataaaaatccttattattgaagattcttcaggaaaaaaaaacccttagtctgaaactttagcaccaatcccccttgccccccattgaaatacgtatttttaaaacatggcttttgataatgtgagggttttttcctttttgcgatttagcagtgctgattgtgtattgcagtagttgtgagagcattagaagcagcagtcgataggaggatggaaggtctggatgccgccttggggagttaggagattggcagacttaccctgtaccactctagccctactcctttgcccaagacagaaacacactgagatggataggagaatatgagcagttgataggaaagttctcagtggagtcaggatttaggttaggccaggagattgagaatataacagtttgtgtatgatgaaatggcatatttcacagaatgcagtaaaagcaggtagggtacaagtgcagcaacaggaagatgtcttttcttcattcagcaaacacttatttgagagcttaccatgtgctaggcacatacaaagataaataagatgcccttgatgatcctctatttaaaggagacatgtaaacaggttaacttagagtagagatggtgaatatgtgaacctgaggaaaggaagaaatagattaaattatctggagagagaggaaaagtcagcagaatggggacgagaatctttcggagctcagtgttctgataggagttatttccttgggcataggttccaagtatttttctaatataccatagaagccaggaaaactttcttctgttatctcaaatgatttaattactgacttgagtttgtgttgtctccttagacttgtgcaccatggacaattttgctgagggagatttcactgtggcggattatgccttgttagaagattgccctcacgtggatgattgtgtctttgctgctgaatttatgagcaatgattatgttcgtgtgactcagctttactgtgatggggtgggtgtgcaatataaagattatatccaaagtgagaggaatttggaatttgacatctgcagtatatggtgtagtaaaccaatttctgtcctgcaagattattgcgatgccattaaaataaacatcttctggccacttctgtttcaacatcaaaacagttccgtaatatcacgattgcatccctgtgtggacgccaacaattcacgtgcttctgagataaatttgaagaaactacaacatcttgagttgatggaagatattgtggatttggcaaagaaagttgctaatgattcattccttattggaggcttattgagaattggttgtaaaatagaaaataaaatcttggcaatggaagaagctctgaattggataaaatatgcaggcgatgtaacaattctaactaaattaggatcaattgacaattgttggcctatgttaagtattttctttactgaatgaaggagaactaatgaaaatgaaaggaaatgaagagttttccaaagaaagatttgatatagctattatctattacaccagagccattgaatatagacctgaaaactaccttctttatggtaaccgagctctttgttttcttcgtactggacagtttagaaatgcactcggtgatggaaagagagccactattctgaagaacacttggccaaagggtcattatcgttattgtgatgctctttctatgctgggggaatatgactgggccctgcaagcaaacataaaagctcaaaaactctgtaaaaatgaccctgagggaatcaaggatctaattcagcagcatgtaaagttacaaaaacaaatagaagacctacaaggtcgaacagcaaataaggatccaattaaagccttttatgaaaacagggcctacacacctaggagtttatcagcacctatatttactacttcacttaactttgtggagaaggaaagagatttcagaaaaattaatcacgaaatggccaacggtggtaatcagaatctaaaggtggcggatgaggcgttgaaggtagatgattgtgactgtcatcctgaattttcaccaccatcaagtcagcctccaaaacataaaggaaaacaaaaatctcgaaacaatgaatcagaaaagttcagttctagttcaccattgactttaccagcagatttgaagaacatcttggagaaacagttttctaaatcttccagagctgcacaccaggattttgctaatataatgaaaatgctgagaagcttaattcaagatggctatatggccttattggagcagcgttgccgcagcgctgcacaggcctttacagagttgctgaacggtttagatcctcaaaaaataaagcaattgaacctggccatgattaactatgttttggtcgtctatggacttgccatttctctccttggaataggacagcctgaggaattatctgaagccgaaaaccagtttaagaggattattgaacactaccccagtgagggccttgattgcttggcctactgtggaattggaaaagtgtatttgaaaaaaaacagatttctagaagctctcaatcactttgagaaagcaagaaccttgatttatcgtcttcctggagtgttaacttggcccacgagtaatgtgattattgaagagtctcagccacaaaaaataaagatgctgttagagaaatttgttgaagaatgcaagttccctccagtgccagatgccatttgttgctatcagaagtgccatggatattctaagatccagatatacataactgatccagactttaagggttttatacgcatcagctgttgccagtactgtaaaatagaatttcacatgaattgctggaagaagttaaaaactacaacctttaatgataaaattgacaaggattttctacaaggaatatgtcttacccctgactgtgaaggtgtcatttctaagattatcatcttcagcagtggtggtgaagttaaatgtgaatttgaacacaaggtcataaaagaaaaggttcctccaagacctattctgaaacagaaatgttctagcctagagaaactaagactgaaagaagacaaaaaattgaagagaaagatccaaaaaaaagaagcaaaaaagttagcacaagaaagaatggaggaggacttaagagaaagtaatccacccaaaaatgaagagcagaaagaaactgtagacaatgttcagcgttgtcagttccttgatgacagaattctacagtgtataaagcagtatgctgacaagattaaatccggcatacagaatacagccatgcttctcaaagaattgctttcttggaaagttttgagcacagaagactatacaacctgtttttctagcagaaattttctaaatgaagcagtggactatgttattcgccacttgattcaagaaaataacagagtaaagacaagaatatttctgcatgttttgagtgagcttaaagaagtggagcccaaattagccgcctggatccaaaaacttaatagctttggcttagatgccacaggaactttcttttctcgttatggagcatctcttaaactgcttgattttagtatcatgactttcctctggaatgagaaatatggtcacaaactagactctatagaaggaaagcaacttgattatttctctgagccagcatcattgaaggaagcccgttgtttaatatggctgctagaagaacacagagacaagttcccagcattgcatagtgctttagatgaattctttgatataatggacagccgctgtactgtgttaaggaaacaagatagtggtgaagcaccgtttagttcaaccaaggtgaaaaacaaaagcaagaaaaagaagccaaaggattcaaagcctatgttagttgggtctggaacaacttcagtaacttcaaataatgagatcatcacttcaagtgaagaccatagcaatcgaaattcagattctgcaggcccatttgcagtgcctgaccatcttcggcaagatgtagaagaattcgaagctctctatgaccaacacagtaacgaatatgttgtccgcaataagaagctatgggacatgaacccaaaacaaaaatgttcaactctatatgattacttctctcagtttttggaggaacatggtcccttggacatgagtaacaagatgttctctgcagaatatgagtttttcccagaagaaactcgacagatactagaaaaagcaggaggtttaaaaccttttctcttgggatgccctcgttttgttgtgattgacaactgtattgcactgaagaaggttgcatcacggctcaagaaaaaaaggaagaagaaaaacattaaaacaaaagtagaagaaatttcaaaagcaggggagtatgtacgagttaaactacaactgaatccagctgctagggaatttaaaccagatgtaaagtctaaaccagtgtcagattcatcttcagcaccagcttttgaaaatgtgaaacccaaacctgtgtctgcaaattctcccaagccagcttgtgaagatgtgaaggccaaaccagtatccgacaattcttctagacaagtttctgaggatgggcaacccaaaggggtctcttctaattctcctaaaccaggctctgaggatgcaaattacaagcgagtctcctgtaattcccccaaaccggttcttgaggatgtgaaaccaacttattgggctcaatcccatttggtcacaggatactgtacgtatcttcctttccagagatttgatatcacccagacaccgccagcatacataaacgtgttaccaggtttgccccagtacaccagcatatatacacccttggccagcctttctcctgaatatcagctaccaagatcagtaccagtggtgccgtcttttgtagccaatgacagagcagataaaaatgctgctgcctattttgagggtcatcatttgaatgctgagaatgttgctggtcaccagattgcctctgaaacacagatccttgagggctctttgggaatatctgtaaagtcacactgcagcacaggtgatgctcatacagtcctgagtgagtctaacagaaatgatgagcactgtggaaattctaacaacaaatgtgaagtaattccagaaagcaccagtgcagtaacaaacattccacacgtgcagatggttgccatacaggtatcttggaacataatacaccaagaagtcaatactgagccatataatccttttgaggaacgacaaggggaaatttcacggattgaaaaggagcaccaagtattacaagaccaacttcaagaagtgtatgaaaattatgagcagataaaacttaagggcttagaagagaccagggacctggaagagaagttgaaaaggcacttagaagaaaacaagatctcaaagacggaattagattggttccttcaagatttggaaagagaaattaaaaaatggcaacaggaaaaaaaagaaatccaagaaagactaaaatcactgaagaagaaaattaaaaaggtttcaaatgccagtgaaatgtatacccagaaaaatgatggaaaggaaaaggaacatgaattacatctggatcagtcccttgaaatcagcaacacacttacaaatgagaaaatgaaaatagaagagtatataaagaaagggaaagaggattatgaagagagtcatcagagagctgtggctgcagaggtatccgtacttgaaaactggaaggagagtgaagtgtataagctacagatcatggagtcacaagcagaagcctttctgaagaagctggggctgattagccgtgatcctgcagcatatcctgacatggagtctgatatacgttcatgggaattgtttctttctaatgttacaaaagaaattgagaaagcaaagtctcagtttgaagaacaaattaaggcaattaaaaatggttctcggctcagtgaactttctaaagtgcagatttctgagctttcatttcctgcctgtaacacggttcatcccgagttactccctgagtcttcaggccacgatggccaagggcttgtgacttctgcaagcgacgtgactggaaaccacgcagcacttcacagggatcctagtgtgttctctgctggtgattccccaggggaggctccttctgcgctgttgccagggccaccccctggtcagcctgaagccactcagctgacagggccaaaacgggctggccaggcagctctgtcagaacgaagccctgtggctgatcggaagcagcctgttcctccaggacgtgctgcgcgttcaagccagtctccaaaaaagccgttcaatagtattattgagcacctgtcagtggtattcccatgttacaacagcactgagcttgctggttttattaaaaaagtgcgaagcaaaaacaagaactcactctcaggattgagtattgatgaaattgtccaaagagtgacagaacacattctagatgaacagaaaaagaaaaagccaaacccaggaaaggacaagaggacttatgagcccagctctgccacccccgtgaccaggtcctcccagggctcaccctcggtggttgttgcaccatcacccaaaaccaaggggcagaaagcagaagatgtccctgtgaggattgcactgggtgcaagttcctgtgaaatatgccacgaggtgttcaaatcaaaaaacgtgcgtgtgctcaaatgtgggcacaagtatcacaaagggtgctttaagcagtggcttaaagggcagagcgcttgcccggcctgccagggtcgtgatctcctgacagaagagtcaccttctggaagaggctggcccagtcagaatcaggagctgccttcctgctcttctaggtagtcacacttcactaaagtgtcatccaccagtgtgttgaatccgaagaatgacaattttctaccactggtgtaaaaaacaaacatttgaagacccttgtgcattgtgtgtcacaaagctaaatacatggaaatcgttaatatcgctgatattaagtaatttccccactctgagtgaatactttgatgattgccaacagtggctaataaaatgacggctaccacactcatgggtcactggggctgcgcagggctctttgaggtgggtggcttcttttggaaagtactatgaacgtctcgaagcagtattctagtgataagaattcttaacatagccaagcgccccacgtttgttccccacgtttgttccccttttctgtttgaaaaacctgttctggtagctccacaagagagatgatactgactttttaaattttttacaagagtctgtattcctgatatgcctatatttttcctcaaagattctgcattttaaggatgggcataagcaaactatattttaataatttatagttaatgttaaaatattggctgatttagaccaaaagattcaaatctcctctttgtgaaatcccatctgcatttgattttttattattttatgttcccccgttagattgttttaagtgtttgcttttcatcttttatagatgtaatctgattttcaaaaatcattaacactttttaattagtatcgactaagactttttccccctggaatcgaggctgtgtgtccgtcatcccagcccccggttggagcctgctctttgaactccgctgccttccttagcagcttctgtcctcttctgtgagtcagtcagcgagtgcttgggatccgcatccagccgtgctgagcacacaacaggctgtgtgtggaaatggccaccaccattctccttccccaccccaccacaaaaagagaagctgtgtctttagacaaccctgaggtatctgtgttacaatcgttctgtgtttgatatttgtgtaaagtatgcatgcagtcttgtactgtgacctaagaacaaaactgtaactgcattagaaaccatgaaaaaattagatattgttttgtgacttttagacagtggtaaatatagaaccatgaattctggtcacattccatttctctccaacatgaaggatcaaaaaatgtttttcaatgtgttctttgttccactggaaacttagagtcatgagtttatgagctgatttggtcaccttcctctgcctttgttcactgtgagttctgatgtcttagtgacttagttcttagaagctcacgccttagtttgaaacagattctccacggtggtccccaaaacactgtctgcatatccataagaattgagcgctatgggtgttaacgtgcatgaggatcagtttgcagcagcaagtacaaaaggagaagaggaacatccgttgaatgagtgtgttttgtacataacttcagatacttgtgaacatgccttatatttgtccaacaactgtcagaataaagaacattctaaaatgag

SEQ ID NO: 11 - DNA, 667 bp, Homo sapiens
cgtgcaccctgagccggagctgcccagtcgccgcgggaccggggccgctggggtctggacgggggtcgccatgatccgctttatcctcatccagaaccgggcaggcaagacgcgcctggccaagtggtacatgcagtttgatgatgatgagaaacagaagctgatcgaggaggtgcatgccgtggtcaccgtccgagacgccaaacacaccaactttgtggaggtcttaaacgaatatttccacaatgtctgtgaactggacctggtgttcaacttctacaaggtttacacggtcgtggacgagatgttcctggctggcgaaatccgagagaccagccagacgaaggtgctgaaacagctgctgatgctacagtccctggagtgagggcaggcgagcaccccaccccggccccggcccctcctggaatcgcctgctcgcttccccttcccaggcccgtggccaacccagcagtccttccctcaactgcctaggaggaagggacccagctgggtctgggccacaagggaggagacttcaccccacttcctctgggccctggctgtgggcagaggccaccgtgtgtgtcccgagtaaccgtgccgttgtcgtgtgattccataagcgtctgtgcgtggagtccccaataaacctgtggtcctgcctggc

SEQ ID NO: 12 - DNA, 5316 bp, Homo sapiens
atcatggcggatggccccaggtgtaagcgcagaaagcaggcgaacccgcggcgcaataacgttacaaattataatactgtggtagaaacaaattcagattcagatgatgaagacaaactgcatattgtggaagaagaaagtgttacagatgcagctgactgtgaaggtgtaccagaggatgacctgccaacagaccagacagtgttaccagggaggagcagtgaaagagaagggaatgctaagaactgctgggaggatgacagaaaggaagggcaagaaatcctggggcctgaagctcaggcagatgaagcaggatgtacagtaaaagatgatgaatgcgagtcagatgcagaaaatgagcaaaaccatgatcctaatgttgaagagtttctacaacaacaagacactgctgtcatttttcctgaggcacctgaagaggaccagaggcagggcacaccagaagccagtggtcatgatgaaaatggaacaccagatgcattttcacaattactcacctgtccatattgtgatagaggctataaacgctttacctctctgaaagaacacattaaatatcgtcatgaaaagaatgaagataactttagttgctccctgtgcagttacacctttgcatacagaacccaacttgaacgtcacatgacatcacataaatcaggaagagatcaaagacatgtgacgcagtctgggtgtaatcgtaaattcaaatgcactgagtgtggaaaagctttcaaatacaaacatcacctaaaagagcacttaagaattcacagtggagagaagccatatgaatgcccaaactgcaagaaacgcttttcccattctggctcctatagctcacacataagcagtaagaaatgtatcagcttgatacctgtgaatgggcgaccaagaacaggactcaagacatctcagtgttcttcaccgtctctttcagcatcaccaggcagtcccacacgaccacagatacggcaaaagatagagaataaaccccttcaagaacaactttctgttaaccaaattaaaactgaacctgtggattatgaattcaaacccatagtggttgcttcaggaatcaactgttcaacccctttacaaaatggggttttcactggtggtggcccattacaggcaaccagttctcctcagggcatggtgcaagctgttgttctgccaacagttggtttggtgtctcccataagtatcaatttaagtgatattcagaatgtacttaaagtggcggtagatggtaatgtaataaggcaagtgttggagaataatcaagccaatcttgcatccaaagaacaagaaacaatcaatgcttcacccatacaacaaggtggccattctgttatttcagccatcagtcttcctttggttgatcaagatggaacaaccaaaattatcatcaactacagtcttgagcagcctagccaacttcaagttgttcctcaaaatttaaaaaaagaaaatccagtcgctacaaacagttgtaaaagtgaaaagttaccagaagatcttactgttaagtctgagaaggacaaaagctttgaagggggggtgaatgatagcacttgtcttctgtgtgatgattgtccaggagatattaatgcacttccagaattaaagcactatgacctaaagcagcctactcagcctcctccactccctgcagcagaagctgagaagcctgagtcctctgtttcatcagctactggagatggcaatttgtctcctagtcagccacctttaaagaacctcttgtctctcctaaaagcatattatgctttgaatgcacaaccaagtgcagaagagctctcaaaaattgctgattcagtaaacctaccactggatgtagtaaaaaagtggtttgaaaagatgcaagctggacagatttcagtgcagtcttctgaaccatcttctcctgaaccaggcaaagtaaatatccctgccaagaacaatgatcagcctcaatctgcaaatgcaaatgaaccccaggacagcacagtaaatctacaaagtcctttgaagatgactaactccccagttttaccagtgggatcaaccaccaatggttccagaagtagtacaccatccccatcacctctaaacctttcctcatccagaaatacacagggttacttgtacacagctgagggtgcacaagaagagccacaagtagaacctcttgatctttcactaccaaagcaacagggagaattattagaaaggtcaactatcactagtgtttaccagaacagtgtttattctgtccaggaagaacccttgaacttgtcttgcgcaaaaaaggagccacaaaaggacagttgtgttacagactcagaaccagttgtaaatgtaatcccaccaagtgccaaccccataaatatcgctatacctacagtcactgcccagttacccacaatcgtggccattgctgaccagaacagtgttccatgcttaagagcgctagctgccaataagcaaacgattctgattccccaggtggcatacacctactcaactacggtcagccctgcagtccaagaaccacccttgaaagtgatccagccaaatggaaatcaggatgaaagacaagatactagctcagaaggagtatcaaatgtagaggatcagaatgactctgattctacaccgcccaaaaagaaaatgcggaagacagaaaatggaatgtatgcttgtgatttgtgtgacaagatattccaaaagagtagttcattattgagacataaatatgaacacacaggtaaaagacctcatgagtgtggaatctgtaaaaaggcatttaaacacaaacatcatttgattgaacacatgcgattacattctggagaaaagccctatcaatgtgacaaatgtggaaagcgcttctcacactctgggtcttattctcaacacatgaatcatcgctactcctactgtaagagagaagcggaagaacgtgacagcacagagcaggaagaggcagggcctgaaatcctctcgaatgagcacgtgggtgccagggcgtctccctcacagggcgactcggacgagagagagagtttgacaagggaagaggatgaagacagtgaaaaagaggaagaggaggaggataaagagatggaagaattgcaggaagaaaaagaatgtgaaaaaccacaaggggatgaggaagaggaggaggaggaggaagaagtggaagaagaagaggtagaagaggcagagaatgagggagaagaagcaaaaactgaaggtctgatgaaggatgacagggctgaaagtcaagcaagcagcttaggacaaaaagtaggcgagagtagtgagcaagtgtctgaagaaaagacaaatgaagcctaatcgtttttctagaaggaaaataaattctaattgataatgaatttcgttcaatattatccttgcttttcatggaaacacagtaacctgtatgctgtgattcctgttcactactgtgtgtgtgtgcgcgtgcattgattactatccatttctttagtcaacgctctccacttcctgatttctgctttaaggaaaactgtgaactttctgcttcatgtatcagttttaaagcatcccaggcaaagatcatctacagattctaggaattctctcccctgaaatcaaaacctggagacttttttttcttattttagttgagaagttcataaactgctcaaggattagttttccaggactctgcggaggaacggcaggaagaacctcagagagggcagaggtgacttcaaagtgctggggactccgtcctgagggtcacttggccctgagcccctgcgtgcccttgcggaagcccagaagcttcttcctgctgcacctcccgtttccgctgctgctgacgtttatgcatttcatgatggggtccaacaagaacacctgacttgggtgaagttgtgcaatattggaggctgactgtagggctgggcagctgggagacaggctcatggctcatggctcatggctcagggcggtgcctgccctgggccgggacccccctccccaccccccacctaggctttttgggttttgttcaaggaaggtaaagtgagaggtttaggtcagtgtttttaagtttttgttttttttttaaagcaaatcctgtatatgtatctacatgggagataggtagacactacttatttgttacattttgtactatacgtttgtgttccaggtttcagcttccctcgctcctgttgttaagaagcgtccctgtcagcacaggtgtgcattgaggaaggggccccagggccttcgctccctcagcactggggtggaggcggcaggaaggggcggcccttacctggcaggtctgggcgcacctttagcaggtggactccgtggggctccaccagccagaagcctctggaaggcaacgaaggcaatgctgctccctgagtccagtccccgcccccaaacccagcccaggtgccttcagctacttcggcttcttaaaccctgcagtgttaaacagaggcattgagaaaggggaaaggcgggtatttttaaaagccaaagattgacccaagttacttgagggtagggaggcgggcccagtgcaggaggctgcatccctggcctgctggtgcccaccgggggctgtgcctgtgccgggccgcaggaagctggctgcccccattcctgctgctgctgctgctgctgctctgtggctgtttcaaagactgggcgaaaggctgtccggagggcagaccaggtgccttgccgcagagaaaacaccaaagtctcctgttcgctcataaagaagtttttgggatgggagagaatccagaccatcttggggcagccaggcccttgccttcatttttacagaggtagcacaactgattccaacacaaaaccccttcccctttttaaaatgatttctgttctaatgccatagatcaaaggcctcagaaaccattgtgtgtttcctctttgaagcaatgacaagcactttactttcacggtggtttttgttttttcttattgctgtggaacctcttttggaggacgttaaaggcgtgttttacttgtttttttaagagtgtgtgatgtgtgttttgtagatttcttgacagtgctgtaatacagacggcaatgcaatagcctatttaaagaactacgtgatctgattgagatgtacatagtttttttttttaccataactgaattattttatctcttatgttatcatgagaaatgtatgccaaatgattagttgatgtatgttttttaatttaatatttaaataaaatatttggaagg

SEQ ID NO: 13 - DNA, 972 bp, Homo sapiens
  modified_base (603)..(603): a, c, g, or t
tccacggtggcatccatgatgcatcgtcaggagactgtggagtgtttgcgcaagttcaatgcccggagaaaactgaagggtgccatcctcacgaccatgcttgtctccaggaacttctcagctgccaaaaacctattgaacaagaagtcggatggcggtgtcaagccaagaaacaactacaagctatagaatttaacaaagctttacttgctatgtacacaaaccaggctgaacaatgccgcaaaatatctgccagtttacagtcccaaagtcccgagcatctcttacctgtgttaatccaagctgcccagctctgccgtgaaaagcagcacacaaaagcaatagagctgcttcaggaattttcagatcagcatccagaaaatgcagctgaaattaagctgaccatggcacagttgaaaatttctcaaggtaatatttctaaagcatgtttaatattgagaagcatagaggagttaaagcataaaccaggcatggtatctgcattagttaccatgtatagccatgaagaagatattgatagtgccattgaggtcttcacacaagctatccagtggtatcaaaaccatcagccaaaatctcctnctcatttgtccttgataagagaagctgcaaacttcaaactcaaatatgggcggaagaaggaggcaattagtgacctacaacagctgtggaaacaaaatccaaaagatattcacaccctggcacagcttatttctgcttactcacttgtagatccagagaaagccaaagctcttagtaaacacttgccatcgtcagatagtatgtcactaaaagtagatgttgaggctcttgaaaattctgctggtgctacatacattcggaagaagggtggaaaagttactggagatagtcaaccaaaggaacaaggacagggagatttgaaaaagtagcaaaaaaaaaaaaaaaaaaacttaaagctatcgattctgg

SEQ ID NO: 14 - DNA, 2716 bp, Homo sapiens
aggctgaggggcggttgttgttggcagctgtggctaaggaggggagaacctctgctccccgcccgtcttctcttctgcgtttcccgggctagggggcgtggggagtggttttaggcggcgaagccgctcggcagcaccttccttctttgccaggcagacgcccgttgtagccgttggggaaccgttgagaatccgccatggagccagagagggaagggaccgagagacaccccaggaaggtcagggaaggcaggcaggccccaaataagctggtcggggcagctgaggcgatgaaagccggttgggatctcgaggagagtcagcccgaggccaagaaagcccgcttatctaccattttatttactgacaactgtgaagtaacccatgaccagctgtgtgaattgctgaagtatgcagttctgggcaaatccaatgttccaaaacccagctggtgccagctttttcatcaaaaccacctaaacaacgtagtggtttttgttctgcagggaatgagtcagctacacttttacaggttctatttggagtttggatgtcttcgaaaagcattcagacataaattccgcttgcctccaccatcatctgattttctagctgatgttgttgggctacaaactgaacaaagagctggagatctgcccaagacaatggaagggcctttaccttctaatgcaaaagccgccatcaaccttcaggatgatcccatcattcaaaagtatggctctaagaaagtgggcttgaccagatgccttctgacaaaggaggaaatgagaacgtttcactttccattacaaggttttcctgattgtgaaaactttttacttaccaaatgtaatggttctatagcagacaatagtcctctctttggacttgactgtgaaatgtgcctcacatccaaggggagagagctaacacgcatctcactggttgctgaaggaggctgctgtgttatggatgaactggtcaaacctgaaaacaagattctggactacctcaccagcttttcgggaatcacgaagaagattcttaacccagtgacgaccaaactcaaagatgtacagaggcagttaaaagcactgcttcctcctgatgctgtgttagtgggccactccttagatttggatctcagagcactgaaaatgatacatccatatgttattgatacatcgttgctttatgtcagagagcagggcagaagatttaagctcaagttcttagccaaagttattttggggaaggatatacagtgtccagacagacttggtcatgatgccacagaagatgctagaacaatccttgaattggctcggtatttccttaagcatggcccaaaaaagattgcagaactaaatctagaagcactagctaatcaccaagaaatacaagcagcaggccaagagcctaaaaacacagcagaagtacttcagcacccaaacacaagtgttttagaatgcttggattcagtgggtcagaagcttctttttttgacccgggagacagatgctggtgaacttccatcttccagaaattgtcaaactattaagtgtctttcaaataaagaggttcttgagcaggccagagtggaaatccccctgtttcccttcagcattgttcagttctcttttaaggccttttcacctgtcctcactgaggagatgaacaaaaggatgaggatcaagtggacagagatatcaactgtctatgctgggccatttagcaaaaattgcaatctcagggctctgaagaggctgtttaaaagctttggcccagtccagtcaatgacttttgttcttgaaacccgtcagcctcatctctgtatacagtatgaagtcctagaagctgcccagctggccatagagtccttggatggtattctggtagatggtatctgcatcaaggtgcagaggcctgtgacagagctcacgcttgattgtgacaccctcgtgaatgagctggaaggagattctgaaaaccaaggctctatatatctgtctggagtgagtgaaaccttcaaagaacagctattgcaggagccccgcctctttcttggcctggaagctgtgatcttgcctaaagatcttaaaagtggaaagcagaaaaaatactgtttcctgaaattcaaaagttttggcagtgcccagcaggccctcaacattctcacaggcaaggactggaagctgaaaggcaggcatgccctaacccccaggcacctccatgcctggctcagaggcttaccacctgaatcaacaaggctcccagggcttcgtgttgtacctcccccctttgaacaggaggccttgcagactctgaaactggaccacccgaagatagcagcctggcgctggagccggaagattggaaagctctacaacagcttgtgcccgggcactctctgcctcatcctgctgccaggaaccaagagcactcatggttcactctctggtctaggactgatgggaataaaagaggaagaagaaagcgctggcccaggcctgtgttcgtgagtcggcctgccatgtttccatgtgccatttcttaccccttgtaggcaatggcaaagaatgtggtcaggctgtagcctccccaaccagcagacagttttatggaaacttggtatagcagctaaaagagtttagtttgtttatatggcatgtataagttttcaataaatgcctaaagttcaagcataaaaaaaaaa

SEQ ID NO: 15 - DNA, 3508 bp, Homo sapiens
  modified_base (2673)..(2673): a, c, g, or t
  modified_base (2688)..(2688): a, c, g, or t
  modified_base (2695)..(2695): a, c, g, or t
  modified_base (2705)..(2705): a, c, g, or t
  modified_base (2708)..(2708): a, c, g, or t
  modified_base (2716)..(2716): a, c, g, or t
  modified_base (2724)..(2725): a, c, g, or t
  modified_base (2728)..(2728): a, c, g, or t
  modified_base (2757)..(2757): a, c, g, or t
  modified_base (2759)..(2759): a, c, g, or t
  modified_base (2763)..(2763): a, c, g, or t
  modified_base (2772)..(2772): a, c, g, or t
  modified_base (2784)..(2784): a, c, g, or t
  modified_base (2788)..(2788): a, c, g, or t
  modified_base (2794)..(2794): a, c, g, or t
  modified_base (2801)..(2801): a, c, g, or t
  modified_base (2805)..(2805): a, c, g, or t
  modified_base (2818)..(2818): a, c, g, or t
  modified_base (2828)..(2828): a, c, g, or t
  modified_base (2840)..(2840): a, c, g, or t
  modified_base (2861)..(2861): a, c, g, or t
  modified_base (2864)..(2865): a, c, g, or t
  modified_base (2934)..(2934): a, c, g, or t
cccaattccgccctgcccccgccgcggcggcgctagccgccactgagggaccgaccctataaaggccgctccgcgaggggtgcgcagcattcggcagagggcgccttcgacgggctgggctgtgcgcctgcgcagtgtgggtcgctcccgattccctgccccggccggccccgcctcggctccgcaccctcgccccgctctcagccgccgctctgccccgcagcagccagccccgtgtccggcagtatgttcagctgggtcagcaaggatgcccgccgcaagaaggagccggagctcttccagacggtggctgaggggctgcggcagctgtacgcgcagaagctgctacccctggaggagcactaccgcttccacgagttccactcgcccgcgctggaggacgctgacttcgacaacaagcctatggtgctcctcgtggggcagtacagcacgggcaagaccaccttcatccgacacctgatcgagcaggacttcccggggatgcgcatcgggcccgagcccaccaccgactccttcatcgccgtcatgcacggccccactgagggcgtggtgccgggcaacgcgctcgtggtggacccgcggcgccccttccgcaagctcaaccggtttggcaacgctttcctcaacaggttcatgtgtgcccagctgcccaaccccgtcctggacagcatcagcatcatcgacacccccgggatcctgtctggagagaagcagcggatcagcagaggctatgactttgcagccgtcctggagtggttcgcggattgttgggaccgcatcatcctgctcttcgacgcccacaagcaggacatctcccatgagttctcggaagtgatcaaggctctgaagaaccatgaggacaagatccgcatggtgctgaacaaggcagaccagatcgagacgcagcagctgatgcgggtgtacggggccctcatgtggtccctgggcaagatcatcaacacccccgaggtggtcagggtctacatcggctccttctggtcccacccgctcctcatccccgacaaccgcaagctctttgaggccgaggagcaggacctcttcaaggacatccagtcactgccccgaaacgccgccctcaggaagctcaatgacctgatcaagcgggcacggctggccaaggttcacgcctacatcatcagctccctcaagaaagagatgcccaatgtctttggtaaagagagcaaaaagaaagagctggtgaacaacctgggagagatctaccagaagattgagcgcgagcaccagatctcccctggggacttcccgagcctccgcaagatgcaggaactcctgcagacccaggacttcagcaagttccaggcgctgaagcccaagctgctggacacggtggatgacatgctggccaacgacatcgcgcggctgatggtgatggtgcggcaggaggagtccctgatgccttcccaggtggtcaagggcggcgcctttgacggcaccatgaacgggccgttcgggcacggctacggcgagggggccggcgagggcatcgacgacgtggagtgggtggtgggcaaggacaagccctcctacgacgagatcttctacacgctgtcccctgtcaacggtaagattacgggtgccaatgttaagaaggagatggtgaagtccaagctccccaacaccgagctagggaagatctggaagctggccgacgtggacaaggacgggctgctggacgacgaggagttcgcgctggccaaccacctcatcaaggtcaagctggagggccacgagctgcccgccgacctgcccccgcacctggtgccgccctccaagcgcagacatgagtgatggcgcccggccccgcacctgccatttgcacgcccggccgggaggcagagacggggggaggggaagcctcaccatttctcaaggtccataaagactgagcggatgtttcctcgcctctcgaaaaggaaaaccaccatctttcttttaaggctgttcctgggcctggcgggggaggcaggggtgagaggatggaattgtgtgcacaagaactgtggctattttaatataacgttagaggctgcgttctttgtcgccgcctcccctgtgtgccagccctgtgtgcacggcctctgccccccggcctttgctgtggctggagctggacagtgcagcgactgcgaccgtgggggagccaggtcgcccttttggcagctgctaggctgaggctgcatggacaggaacaccaggcaccctccgtgtgcttctgagctgaggttgcttcacgggaccgtggcttccttcctcacctggctctgcctcccccgtgctctcgggcgaagtgggttcttgtgccttcccctcccgggcccaggctccccgtgcgcgggccctgccctttcctcccgcgccccaccggctccgacgcgcaaccccgctcagcagtcacagaagcagggcccagccaccttggtctttttttgggagttcaggggagtaggagaatgtcttccagaaaaatacataagctagtttctgttctgtaaagtgatatctttcatacttgaccaaagttcccaataacttcccaaccactgttcaaaactgtgaatttttgtctccccttcccaccctccaaccaaggaacaaccctgcccagggggntaattaaggagtggnataacgnggggggattnacnccctttanccggaacnnganggcttgtaattttcctgaattgatggaangntttnttcaattcnccagcttcgttnccanaaaccntattaanttanagtgagagctctnggggaacccnaccctccgaacntttgggggagggttggtcggngcnnttggcaacccggcgggggccctaaacggacaagccccagtgatgggcaaagaatatgccagaggtcctngataccttttaagcccaagacaagggggagcagggacaaaaccagcccaatatgtaatcccctctcatttcctaccttccttcctcctctgtttagcaaaggagggcagctcacttggatgtccttacaacgcccctggcccccaggttgagcaataagaaaccagaaccttgcgcccagtggcccgggccagttcaggccgcctccccctcctctgcctggggccattgagcccagcctccagggcccgggcgcgtttgcagccagtggccactgtccgggctgtgatggcaccaaggcaggtggagcaccaggtaccacacagctgggcttcccaccaggctttcccgcgggggtctcagggagttctccccagcgctgcttgctcggagtctgcaggaactggccttgttctcctagcccgtcactccatacagtattaggtgaggatggatgcgggcgctgtccttgccgggaagtcactgttgaagttgcagtggcttgttcacacctgtgggaagagaagtgaagactttctccttgcattaaaaagtctgaactgtgaaaaaaaaaa

SEQ ID NO: 16 - DNA, 1449 bp, Homo sapiens
tcatactggagagaagccctacgtttgtgaagaatgtggcaaagcctttaagtactcccgtatccttactacacataagagaattcatactgaagagaaaccatacaagtgtaataaatgtggcaaagcctttattgcatcctcaacccttagtagacatgagttcattcatatgggaaagaaacattacaaatgtgaagaatgtggcaaagccttcatttggtcctcagtcctaactagacataagagagttcatactggagagaagccctacaaatgtgaagaatgtggcaaagcctttaagtactcctctacccttagttcacataagagaagtcatactggagagaaaccctacaaatgtgaagaatgtggcaaagcctttgttgcatcctcaacccttagtaaacatgagatcattcatactggaaagaaaccctacaagtgtgaagaatgtggcaaagcttttaaccagtcctcatcccttactaaacataagaaaattcatactggagagaaaccctacaaatgtgaagaatgtggcaaagcttttaaccagtcctcttcccttactaaacataagaaaatccattctggagagaaaccatacgagtgtgataaatgtggcaaagcctttatttcaccctcaagccttagtagacatgagataattcatactggggagaaaccctagaagtgtgaagaatgtggcaaagccttcaagtggtcctcacaccttactatacactgagagttctgaacttactctgtaaccatcccaaactcctcccaggcacagtctggcagaggtcctgccatttcggagacctggaggaagtggcccatttacagccatgtaggcaggcctgcagaccttggcctttactacggtacctgaagtggttcaatgactcagtttcagttacctgagccacagcttaaggtcagttctgcctatatagaaacccacacagttaacctgaggaaatgctctctggtactcactgaaagccacactcatccacatcctgatacaaggcccaccatatgcagacctgactgccaaaacatgccctagtgtctgccgtacagagtgaagtcctgaaggatatttagtctgtccaaaactaaaatgaagatttcaactccccaaccccctctaacaagccagctaaaggtggactatagtgcagacccagcaaccttgtgaccaagctaaaacccctcatcactacaaattcagagggcatctcatcaccctaagggcccaacgaaagatctttaccttctaacatcagtttatgaaaacttgaaaaggtgtttgctccatcaaattcagacaccagtacaaaactatattatgcccattgtctggttctattttaatgtagcactggaagtgtgtggcagaagaattagtcaaagaaataaaaatagccattgaaattg

SEQ ID NO: 17 - DNA, 5605 bp, Homo sapiens
  modified_base (2235)..(2235): a, c, g, or t
  modified_base (2659)..(2659): a, c, g, or t
  modified_base (2667)..(2667): a, c, g, or t
  modified_base (3334)..(3334): a, c, g, or t
  modified_base (5256)..(5256): a, c, g, or t
ggagtgggccaggccgccagccccgccagccccgccagccccgccagccccgcgatggcttgggccgcgctcctcggcctcctggccgcactgttgctgctgctgctactgagccgccgccgcacgcggcgacctggtgagcctcccctggacctgggcagcatcccctggttggggtatgccttggactttggaaaagatgctgccagcttcctcacgaggatgaaggagaagcacggtgacatctttactatactggttgggggcaggtatgtcaccgttctcctggacccacactcctacgacgcggtggtgtgggagcctcgcaccaggctcgacttccatgcctatgccatcttcctcatggagaggatttttgatgtgcagcttccacattacagccccagtgatgaaaaggccaggatgaaactgactcttctccacagagagctccaggcactcacagaagccatgtataccaacctccatgcagtgctgttgggcgatgctacagaagcaggcagtggctggcacgagatgggtctcctcgacttctcctacagcttcctgctcagagccggctacctgactctttacggaattgaggcgctgccacgcacccatgaaagccaggcccaggaccgcgtccactcagctgatgtcttccacacctttcgccagctcgaccggctgctccccaaactggcccgtggctccctgtcagtgggggacaaggaccacatgtgcagtgtcaaaagtcgcctgtggaagctgctatccccagccaggctggccaggcgggcccaccggagcaaatggctggagagttacctgctgcacctggaggagatgggtgtgtcagaggagatgcaggcacgggccctggtgctgcagctgtgggccacacaggggaatatgggtcccgctgccttctggctcctgctcttccttctcaagaatcctgaagccctggctgctgtccgcggagagctcgagagtatcctttggcaagcggagcagcctgtctcgcagacgaccactctcccacagaaggttctagacagcacacctgtgcttgatagcgtgctgagtgagagcctcaggcttacagctgcccccttcatcacccgcgaggttgtggtggacctggccatgcccatggcagacgggagagaattcaacctgcgacgtggtgaccgcctcctcctcttccccttcctgagcccccagagagacccagaaatctacacagacccagaggtatttaaatacaaccgattcctgaaccctgacggatcagagaagaaagacttttacaaggatgggaaacggctgaagaattacaacatgccctggggggcggggcacaatcactgcctggggaggagttatgcggtcaacagcatcaaacaatttgtgttccttgtgctggtgcacttggacttggagctgatcaacgcagatgtggagatccctgagtttgacctcagcaggtacggcttcggtctgatgcagccggaacacgacgtgcccgtccgctaccgcatccgcccatgacacagggagcagatggatccacgtgctcgcctctgcccagcctgccccagcctgccccagcctcccagctttctgtgtgcacagttggcccgggtgcaggtgctagcattaccacttccctgcttttctcccagaaggctgggtccaggggagggaaaagctaagagggtgaacaaagaaaagacattgaaagctctatggattatccactgcaaagttttctttccaaaatcaggctttgtctgctcccaattcacctcgttactctcacctcgtgatatccacaaatgctattcagataaggcagaactaggagtcttcactgctctgcccccaactcccggaggtgtcaccttcctagttcttatgagctagcatggcccgggccttatccagtcaaagcggatgctggccacagaaaggccactcaggatgtcctttgtgtccattgatgtcattcagcagtcagtcccccaataatccttaaactagctaaaaccaaaggagtcccttagaagatctgcttccctggggccccatttgccagattgccccattgctcacactacttgagaaaatgcaggagagcttcccccaaggctgatgcattcccggtgcagaacaggggcaccctccaaacactgggctctgaggagtggagttctctgttctagagtnacaggcaccagatgggatgggctttctcagtgtcagcactcaggtagggagctaaggaagacacagcccagacaagatggctggaaggagccagccaggactccttagactgatcaagccaaaaaagaaggtgccgatttcatgcattctagtgcagaagccccaactgtgatcacgatccagtctgcagacgtgttttgtttggacttcacttaaaaaaatgccttagttgttatcatctttgggagagttcattcaaaatgtccagcttctcttgaaaacttggtatatctggccacactgggctcacattcccaagggtaactcttggccagagctgagtggcagccgcctcccttatgcaggacatgtgctctcggcttcaccagggttctgaccgggtctgcttctgcattcacagcgnctcctggncctgaaggcatctgagtgtgagaccctgttctaactcttagaagtgacattgtaagaggtggtggggaccagctaattggtccaacccagcctgagtgcaccaccctttgaacaaatgtatcagtgatgaaaatttgcctttgccccggcttgcctgtaatcccagcactttgggaggccgaggtgggcggatcacttgaggtcgggagttcaagaccagcctggccaacatggcgaaaccccgtctctactaaacataaaaaaattagtcaggtgtggcggtgccgtgcctgtaatcccagctattcaggaggctgaggcaccagaattgcttgaacccaggaggtggaggttgcagtgaactgaagactgcgccacggcactccagcctgggcgacagagcaagactctgtctcaataaataaataattaattaaaataaaaaacagcttaaagagaaaaatggcctgcaaaccttttttatgatgctatttttattaatataaagtcctgtttattgagaccctttaaatgcctgcgagagaccctacagacagtatgtctactcctcacagcatctctatgaagagaaggagggttgtgcccacttcatagatgagaaaactgagaggtgaggtgacttgcctggggccacatagctcataanctgtagaactctgcaggcagatttactgtcccaggagcaaatgctggatgagcaactcctgttctttgggctcaaggggactggtgatgggacaattcttctcgacttcaggagctgacagagccagaggcacctaaacttgggtacatcttgtaagacacataatgaggtccctctagctttagctggagggagataaaagaaccccagacctctgaatgtcccagaggctagtctcttctcagagcagcactggggtttgggggcttccctgggcctcagcctccaggcacccccaggattcccagagagacgctgtgattggcaggaggcaggatatccccagggaaacccatcttcacgcctgggtgacccccactgccgcctccttcttaactctgcaggaaatcagagctggcagcctccagtgggaggacagagccggtttccgtggcaaccctcagctgcctcatcgtggctgggaagggaaggaagcaagccggcagaaatagctatggaaggtcttgcgcaggctgcaaccctggtgtgctgggcgaaaacccttatgactccccccttccaaatcaggctgggttgtcactgagactagattctcacctgccttcaaagaagggccaattccctttaaaggtcgcacctccttggaaccacagtcattagtgaattacactcaaggaaaagatgtgctcccaccaggcagctccagctgttacctgagatactgaagtgcagctcaggagacgattatttaaacctgcccttgttttaatcgttatttttctctttaaaaaaaatagaagctataaagaaaagagggagagatgagtgggttagctacctgctatgcgctagttaggaagttacctggatgccattgtatttcttcatcccttgcttaagaatcaaaattactggacatatgttaggaatactctttctttctttctttctttttaagctcagtggcaagaatgaaatactctttttttttttttttttttgagatggagtctcgctctgctgcccaggctagagtgcagtggcgtgatctcggctcactgcaagctctgcctcccgtgttcacaccattctcctgcctcagcctcctgagtagctgggactacaggcacccgccaccacacccggctaatttttggatttttagtagagatgggatttcaccgtattagccaggatggtcttgatctcctgagctcgtgatctgcccgcctcggcctcccaaagtgctgggattacaggtgtgagccaccgcgcccagccaagaataaaatactcttaagttgatctaatgaagtgtttccttaccattgtgattattgttactattatttgctatattttaatattgttgtttaccaaatattctcctttaaacagactcgctttttaaacttttttttttttttttgagacggagtttcacgcttattgcccaggctggagtgcaatggcacgatctcagctcaccacaacctccacctcctgggtttaagcaatgcttctgcctcagcttcccaagtagctgagattacaggcgcacaccaccacggccaactggtttttgtatttttagtagagacggggttcccccatgttggtcaggctggtctcgaaactcctgaccctcgtgatttgcctgcctggggcctcccaaagtgctaggattacaggcatgagccaccatgcccggcctaaactttgtttttaaaatgaactttttttccccccaattgctgccaatagtggataacatgtatcactcactgccaaaaatagaaagtgaccatgaaaaataaattcgctggggaagggggctccatgctggtgtggccaaggctgagagctctctcttctctgttacaaaacgagataagcaagtnttagaattgccttaaggccacactggcatctccctgaccttctccagggacagaagcaggagtaagtttctcatcccatgggcgaccagggccatctcctcccaccagtggcccccactcacagggagctggcaatgccctacctgcctgttctccagatggagaaacaggctctgagatttcacaggtcttgcccaaagtcattgattttaatgattaaaaagaataaacacagtgtttcctgagtagcagtgattgttatgccttgctattttaataaagattctattttcgtataacattgtcaagtggaaacatgctgaaatctattaaaccatctttgtttgtg

SEQ ID NO: 18 - DNA, 1781 bp, Homo sapiens
ggcacgaggggtggtggcagaggcgcctgcggttactggccgggccgacgggtcctgagtctccagagctcggtgaggcgtcccggaggcggcgatcacggttcttacatccccgcgtccccaggtttagcctgagcagggttgtggaaggccgggacccattgacagcacgatggtgacggagcaggaggtggatgccatcgggcagacgctggtggaccccaagcagcccctgcaggcccgcttccgggcgctgttcacgctgcgtgggctcggcggcccaggcgccattgcatggatcagccaggccttcgatgacgattccgccctgctcaagcacgagctggcctactgcctgggccagatgcaggatgcccgcgccatccccatgctggtggacgtgctgcaagacacccgtcaggagcccatggtgcgccatgaggcaggggaggccctgggggccatcggggacccggaagttctggagatcctgaagcagtattcctcggaccccgtcatcgaggtggccgagacctgccagctggccgtgcgcaggctggagtggctgcagcagcacggcggggagccggcggcgggaccctacctctccgtggaccctgccccgccggctgaggagcgtgacgtggggcgcctgcgggaggcgctgctggatgagtcccggccgctcttcgagcgataccgcgccatgttcgccctgcgcaacgcgggaggcgaggaggccgccctggcgctggccgagggtctgcactgtgggagcgccctcttccgccacgaggtcggctacgtcctgggacagctgcagcacgaggcggcggtgccccagctggcggccgccctggcccgatgcaccgagaaccccatggtgcggcacgagtgcgcggaggccctgggcgccattgcccggcccgcctgcctggccgcgctgcaggctcacgcggacgacccagagcgcgtggtgcgtgagagctgcgaggtggctctggacatgtatgagcacgagaccgggcgggccttccagtacgcggacggcctggagcagctgcgcggggccccctcctagggccccaccctcacccggagctcccggaggactcttgagggccgctcctcccccgcagagctttggcgtctaaaccgggtgtgtgtaaatcggtgtcatcgcttgtgtcttgctgggcgcacggttgctgtccccctcctccgtctgggaccgaggagctgccgttgtgctgtgactccctgagtcccctgactgctcctcggggcctggcgcagggctgtagcgtggaagtttccaggcttggggtgggactctgcgggaggctctgggatgcccggctcaggacaggggaggattgcgagggaagccaggggaggatcgcgagggaagccaggggaggatcgcgagggaagccaggggaggatcgcgagggaagccaggggaggatcgcgagggaagccaagggaggatcgcgaggggagccaggggaggatcgcgagggaagccaggggcagagctggggctctgggaagaggctgacgttatggtggcttcagcttcactaggaatgggacacagggtctgggggcctctgactcccccaccccgaggcctgggtagggacagggtggtggtccctgggtgggtcaggtagggcacaggggccagggagggacaagcagacctcagagcgctgcccagatggaatattaaattatttttgccaaaacaaaaaaaaaaaaaaaaaaaaaaaaaaaaa

SEQ ID NO: 19 - DNA, 1890 bp, Homo sapiens
cttaataagaagagaaggcttcaatggaaccttttgtggtcctggtgctgtgtctctcttttatgcttctcttttcactctggagacagagctgtaggagaaggaagctccctcctggccccactcctcttcctattattggaaatatgctacagatagatgttaaggacatctgcaaatctttcaccaatttctcaaaagtctatggtcctgtgttcaccgtgtattttggcatgaatcccatagtggtgtttcatggatatgaggcagtgaaggaagccctgattgataatggagaggagttttctggaagaggcaattccccaatatctcaaagaattactaaaggacttggaatcatttccagcaatggaaagagatggaaggagatccggcgtttctccctcacaaacttgcggaattttgggatggggaagaggagcattgaggaccgtgttcaagaggaagctcactgccttgtggaggagttgagaaaaaccaaggcttcaccctgtgatcccactttcatcctgggctgtgctccctgcaatgtgatctgctccgttgttttccagaaacgatttgattataaagatcagaattttctcaccctgatgaaaagattcaatgaaaacttcaggattctgaactccccatggatccaggtctgcaataatttccctctactcattgattgtttcccaggaactcacaacaaagtgcttaaaaatgttgctcttacacgaagttacattagggagaaagtaaaagaacaccaagcatcactggatgttaacaatcctcgggactttatggattgcttcctgatcaaaatggagcaggaaaaggacaaccaaaagtcagaattcaatattgaaaacttggttggcactgtagctgatctatttgttgctggaacagagacaacaagcaccactctgagatatggactcctgctcctgctgaagcacccagaggtcacagctaaagtccaggaagagattgatcatgtaattggcagacacaggagcccctgcatgcaggataggagccacatgccttacactgatgctgtagtgcacgagatccagagatacagtgaccttgtccccaccggtgtgccccatgcagtgaccactgatactaagttcagaaactacctcatccccaagagctttgataacaagataatgctggctgcataaaactagggcacaaccataatggcattactgacttccgtgctacatgatgacaaagaatttcctaatccaaatatctttgaccctggccactttctagataagaatggcaactttaagaaaagtgactacttcatgcctttctcagcaggaaaacgaatttgtgcaggagaaggacttgcccgcatggagctatttttatttctaaccacaattttacagaactttaacctgaaatctgttgatgatttaaagaacctcaatactactgcagttaccaaagggattgtttctctgccaccctcataccagatctgcttcatccctgtctgaagaatgctagcccatctggctgctgatctgctatcacctgcaactctttttttatcaaggacattcccactattatgtcttctctgacctctcatcaaatcttcccattcactcaatatcccataagcatccaaactccattaaggagagttgttcaggtcactgcacaaatatatctgcaattattcatactctgtaacacttgtattaattgctgcatatgctaatacttttctaatgctgactttttaatatgttatcactgtaaaacacagaaaagtgattaatgaatgataatttagtccatttcttttgtgaatgtgctaaataaaaagtgttattaattgctggttca

SEQ ID NO: 20 - DNA, 1056 bp, Homo sapiens
aagctgcactcctcaggcttccggtcttgtggaccgaggctcctctccaatcgtcctaaagcaactgaaggaacaattgataacaatttaaacatgttaatttatttaatctgatttggttgttaaaacagccttaaaactctcattcctatttcccagcaattgcaagagacgcctccgcggagccggcgctcagatgccaaaggctggagtcgttggtgacgtcatccagggctgggctatgcggggtggggccaagaagcaggaccaaagttccggtatgcgcgctttcagtcttcaattaggtccgaattcccggcatataagggcgttgctttgccttggcgtttaggtttcttaagttggttttagaagttgcttagtcatgtctggccgtggtaaaggtggaaaaggtttgggtaagggaggagctaagcgtcatcgcaaggttttgcgcgataacatccagggcatcactaagccagctatccggcgccttgctcgtcgcggcggtgtcaagcgaatttctggccttatctatgaggagactcgtggtgttctgaaggtgttcctggagaacgtgattcgtgacgctgtcacttacacagagcacgccaaacgcaagaccgtgacagcaatggatgtggtctacgcgctgaagcgacagggacgcactctttacggcttcggtggctaaggctcctgcttgctgcactcttattttcattttcaaccaaaggcccttttcagggccgcccacttttttcataaaagagcagacatcttgttatcctgctttgttccagatttttgctgagaagtagttactgtgcacatgtgtagatttgcaggtaacgtttaattactcgtgcttaatctcgcatgtttaggatttgggcataaagtagttaaagccactgttttctgcttgagggaagttggtatgttgaatatgtttagctttcttgtggcattttaacactagatatcagtgagtaagctggattgtgacagtttataattcccgtgggccttcctccttcagtttaagctgac

SEQ ID NO: 21 - DNA, 623 bp, Homo sapiens
atggcaggaaaatcttcactttttaaagtaattctctttggagatggtggagttggaaagagttatcttatgcacagatatgtaattaataggtttgatacccagctctttcatacataggtgtggaatttttaagtaaagatttggaagtggatggacattttggtaccaagtagaattgggacacagcaggtcaggagcgattctgaagcctgaggatgccattttacagaggttctgactgctgcctgcttacttttagtgttgacaattccaaagcttccagaacttaagtaactggaagaaagaattcttatatttcgctgatgtgaaagaacccaaaagctttccttttgtaattttgggtaacaagactgacagtgaacagcaggtgtctgcagaagaagcccaagcctggtgcagggacggcagcgactatccttaatttgaaacaagtgcaaaagatcgtcaaatgtggcagtagcatttgaaaagggggttccaagagttcttactaccagggataggtcagatcacttgactcagagagtgatggtctgacttcatcgaaaccattggtcaatcttcattgaaagcccaagcctagctcatcttgctgttga

SEQ ID NO: 22 - DNA, 3727 bp, Homo sapiens
gtcgcggtgtgctaagcgaggagtccgagtgtgtgagcttgagagccgcgcgctagagcgacccggcgagggatggcggccaccgggaccgcggccgccgcagccacgggcaggctcctgcttctgctgctggtggggctcacggcgcctgccttggcgctggccggctacatcgaggctcttgcagccaatgccggaacaggatttgctgttgctgagcctcaaatcgcaatgttttgtgggaagttaaatatgcatgtgaacattcagactgggaaatgggaacctgatccaacaggcaccaagagctgctttgaaacaaaagaagaagttcttcagtactgtcaggagatgtatccagagctacagatcacaaatgtgatggaggcaaaccagcgggttagtattgacaactggtgccggagggacaaaaagcaatgcaagagtcgctttgttacacctttcaagtgtctcgtgggtgaatttgtaagtgatgtcctgctagttccagaaaagtgccagtttttccacaaagagcggatggaggtgtgtgagaatcaccagcactggcacacggtagtcaaagaggcatgtctgactcagggaatgaccttatatagctacggcatgctgctcccatgtggggtagaccagttccatggcactgaatatgtgtgctgccctcagacaaagattattggatctgtgtcaaaagaagaggaagaggaagatgaagaggaagaggaagaggaagatgaagaggaagactatgatgtttataaaagtgaatttcctactgaagcagatctggaagacttcacagaagcagctgtggatgaggatgatgaggatgaggaagaaggggaggaagtggtggaggaccgagattactactatgacaccttcaaaggagatgactacaatgaggagaatcctactgaacccggcagcgacggcaccatgtcagacaaggaaattactcatgatgtcaaagctgtctgctcccaggaggcgatgacggggccctgccgggccgtgatgcctcgttggtacttcgacctctccaagggaaagtgcgtgcgctttatatatggtggctgcggcggcaacaggaacaattttgagtctgaggattattgtatggctgtgtgtaaagcgatgattcctccaactcctctgccaaccaatgatgttgatgtgtatttcgagacctctgcagatgataatgagcatgctcgcttccagaaggctaaggagcagctggagattcggcaccgcaaccgaatggacagggtaaagaaggaatgggaagaggcagagcttcaagctaagaacctccccaaagcagagaggcagactctgattcagcacttccaagccatggttaaagctttagagaaggaagcagccagtgagaagcagcagctggtggagacccacctggcccgagtggaagctatgctgaatgaccgccgtcggatggctctggagaactacctggctgccttgcagtctgacccgccacggcctcatcgcattctccaggccttacggcgttatgtccgtgctgagaacaaagatcgcttacataccatccgtcattaccagcatgtgttggctgttgacccagaaaaggcggcccagatgaaatcccaggtgatgacacatctccacgtgattgaagaaaggaggaaccaaagcctctctctgctctacaaagtaccttatgtagcccaagaaattcaagaggaaattgatgagctccttcaggagcagcgtgcagatatggaccagttcactgcctcaatctcagagacccctgtggacgtccgggtgagctctgaggagagtgaggagatcccaccgttccaccccttccaccccttcccagccctacctgagaacgaagacactcagccggagttgtaccacccaatgaaaaaaggatctggagtgggagagcaggatgggggactgatcggtgccgaagagaaagtgattaacagtaagaataaagtggatgaaaacatggtcattgacgagactctggatgttaaggaaatgattttcaatgccgagagagttggaggcctcgaggaagagcgggaatccgtgggcccactgcgggaggacttcagtctgagtagcagtgctctcattggcctgctggtcatcgcagtggccattgccacggtcatcgtcatcagcctggtgatgctgaggaagaggcagtatggcaccatcagccacgggatcgtggaggttgatccaatgctcaccccagaagagcgtcacctgaacaagatgcagaaccatggctatgagaaccccacctacaaatacctggagcagatgcagatttaggtggcagggagcgcggcagccctggcggagggatgcaggtgggccggaagatcccacgattccgatcgactgccaagcagcagccgctgccaggggctgcgtctgacatcctgacctcctggactgtaggactatataaagtactactgtagaactgcaatttccattcttttaaatgggtgaaaaatggtaatataacaatatatgatatataaaccttaaatgaaaaaaatgatctattgcagatatttgatgtagttttcttttttaaattaatcagaaaccccacttccattgtattgtctgacacatgctctcaatatataataaatgggaaatgtcgattttcaataatagacttatatgcaggctgtcgttccggttatgttgtgtaagtcaactcttcagcctcattcactgtcctggcttttatttaaagaaaaaaaaggcagtattccctttttaaatgagctttcaggaagttgctgagaaatggggtggaatagggaactgtaatggccactgaagcacgtgagagaccctcgcaaaatgatgtgaaaggaccagtttcttgaagtccagtgtttccacggctggatacctgtgtgtctccataaaagtcctgtcaccaaggacgttaaaggcattttattccagcgtcttctagagagcttagtgtatacagatgagggtgtccgctgctgctttccttcggaatccagtgcttccacagagattagcctgtagcttatatttgacattcttcactgtctgttgtttacctaccgtagctttttaccgttcacttccccttccaactatgtccagatgtgcaggctcctcctctctggactttctccaaaggcactgaccctcggcctctactttgtcccctcacctccaccccctcctgtcaccggccttgtgacattcactcagagaagaccacaccaaggaggggccgcggctggcccaggagagaacacggggaggtttgtttgtgtgaaaggaaagtagtccaggctgtccctgaaactgagtctgtggacactgtggaaagctttgaacaattgtgttttcgtcacaggagtctttgtaatgcttgtacagttgatgtcgatgctcactgcttctgctttttctttctttttattttaaaaaatctgaaggttctggtaacctgtggtgtatttttattttcctgtgactgtttttgttttgtttttttcctttttcctcccctttagccctattcatgtctctacccactatgcacagattaaacttcacctacaaactccttaatatgatctgtggagaatgtacacagtttaaacacatcaataaatactttaacttccaa

SEQ ID NO: 23 - DNA, 2087 bp, Homo sapiens
gcgagaagagcagacaccgtgctcctggaatcacccagcatgttgcaaggtctcctgccagtcagtctcctcctctctgttgcagtaagtgctataaaagaactccctggggtgaagaagtatgaagtggtttatcctataagacttcatccactgcataaaagagaggccaaagagccagagcaacaggaacaatttgaaactgaattaaagtataaaatgacaattaatggaaaaattgcagtgctttatttgaaaaaaaacaagaacctccttgcaccaggctacacggaaacatattataattccactggaaaggagatcaccacaagcccacaaattatggatgattgttattatcaaggacatattcttaatgaaaaggtttctgacgctagcatcagcacatgtaggggtctaaggggctacttcagtcagggggatcaaagatactttattgaacctttaagccccatacatcgggatggacaggagcatgcactcttcaagtataaccctgatgaaaagaattatgacagcacctgtgggatggatggtgtgttgtgggcccacgatttgcagcagaacattgccctacctgccaccaaactagtaaaattgaaagacaggaaggttcaggaacatgagaaatacatagaatattatctggtcctggataatggtgagtttaaaaggtacaatgagaatcaagatgagatcagaaagagggtatttgagatggctaattatgtcaacatgctttataaaaagctcaatactcatgtggccttagttggtatggaaatctggactgacaaggataagataaagataaccccaaatgcaagcttcaccttggagaatttttctaaatggagggggagtgttctctcaagaagaaagcgtcatgatattgctcagttaatcacagcaacagaacttgctggaacgactgtgggtcttgcatttatgtctacaatgtgttctccttattctgttggcgttgttcaggaccacagcgataatcttcttagagttgcagggacaatggcacatgaaatgggccacaactttggaatgtttcatgacgactattcttgcaagtgtccttctacaatatgtgtgatggacaaagcactgagcttctatatacccacagacttcagttcctgcagccgtctcagctatgacaagttttttgaagataaattatcaaattgcctctttaatgctccattgcctacagatatcatatccactccaatttgtgggaaccagttggtggaaatgggagaggactgtgattgtgggacatctgaggaatgtaccaatatttgctgtgatgctaagacatgtaaaatcaaagcaacttttcaatgtgcattaggagaatgttgtgaaaaatgccaatttaaaaaggctgggatggtgtgcagaccagcaaaagatgagtgcgacctgcctgaaatgtgtaatggtaaatctggtaattgtcctgatgatagattccaagtcaatggcttcccttgccatcacgggaagggccactgcttgatgggcacatgccccacactgcgggagcagtgcacagagctgtggggaccaggtaggaggacaaatcctttcccctgtgcatgtgcgaaggaaaatcatttcagatgacagtgtttaaccatggtcaaaagaccattctgtcctatccttcttagaagcttcgaactcaaaatcatggaaaggttttaagatttgaggttggttttagggttgctagatttagcaagtaaaaataaggatggccccgttaaattttaacttaaaattaacaagttttttgttaattttttgttttttgtctcagcatcagtatatcccatgcaatatttgaggtgtgctcatactaaaattatttgtgtatctgaaattcaaattaaactgggtgtctttttcttttcatctggcaaccctactaagatcataaacccttggaaatctgtgtgtgtgcgggtgtgtgtgtgtgtgtgtgtgcaggggtggcagaagtactgtgggatgggacagaaataaaaaaaaaaaaaaaaaaaaaaaaa

SEQ ID NO: 24 - DNA, 665 bp, Homo sapiens
agaggaaagaaccctgggaacgggaggcgaagggataatgagctggggatgggagcagtcgcaggaagaatcctctgcctggagccggcagactccaacccctcagcttgagactcaggagccccatagtccccacagcaataagaagcaccagctcctggtcccgaaaaaaggagggccccaactccagggactgcggcccgccctggagctgagaacacgcggactccagggagaggacagggcttcagggacccgagagccgctctgagcaccgggggatgtgactgcctcagcggcagagctggaagggccctcgaatgccattcacaggaacagcccaggaacccagggacttcagaaggtttgtccgaaaagtgagaggaggcggaggagagagcctgcgaggtcaagctgcagagaacatgagcttctacctccagatgtgccagggtgcatctcaataaacttggattttggccaggcgcggtggctcaggcctgtaatcccagctctggaagctgaaggatagcttgagcccaggagttcgaggctgcagtgagctatgatctcaccactacactccagcctgggtgacagcaagagatcttgtctcagaaataaataaataaaatttaaaaataaaaaaaaaaaaaaaaaaaaaa

SEQ ID NO: 25 - DNA, 1987 bp, Homo sapiens
ctcgagagctccgccatggccgctctcacccgggacccccagttccagaagctgcagcaatggtaccgcgagcaccgctccgagctgaacctgcgccgcctcttcgatgccaacaaggaccgcttcaaccacttcagcttgaccctcaacaccaaccatgggcatatcctggtggattactccaagaacctggtgacggaggacgtgatgcggatgctggtggacttggccaagtccaggggcgtggaggccgcccgggagcggatgttcaatggtgagaagatcaactacaccgagggtcgagccgtgctgcacgtggctctgcggaaccggtcaaacacacccatcctggtagacggcaaggatgtgatgccagaggtcaacaaggttctggacaagatgaagtctttctgccagcgtgtccggagcggtgactggaaggggtacacaggcaagaccatcacggacgtcatcaacattggcattgtcggctccgacctgggacccctcatggtgactgaagcccttaagccatactcttcaggaggtccccgcgtctggtatgtctccaacattgatggaactcacattgccaaaaccctggcccagctgaacccggagtcctccctgttcatcattgcctccaagacctttactacccaggagaccatcacgaatgcagagacggcgaaggagtggtttctccaggcggccaaggatccttctgcagtggcgaagcactttgttgccctgtctactaacacaaccaaagtgaaggagtttggaattgaccctcaaaacatgttcgagttctgggattgggtgggaggacgctactcgctgtggtcggccatcggactctccattgccctgcacgtgggttttgacaacttcgagcagctgctctcgggggctcactggatggaccagcacttccgcacgacgcccctggagaagaacgcccccgtcttgctggccctgctgggtatctggtacatcaactgctttgggtgtgagacacacgccatgctgccctatgaccagtacctgcaccgctttgctgcgtacttccagcagggcgacatggagtccaatgggaaatacatcaccaaatctggaacccgtgtggaccaccagacaggccccattgtgtggggggagccagggaccaatggccagcatgctttttaccagctcatccaccaaggcaccaagatgataccctgtgacttcctcatcccggtccagacccagcaccccatacggaagggtctgcatcacaagatcctcctggccaacttcttggcccagacagaggccctgatgaggggaaaatcgacggaggaggcccgaaaggagctccaggctgcgggcaagagtccagaggaccttgagaggctgctgccacataaggtctttgaaggaaatcgcccaaccaactctattgtgttcaccaagctcacaccattcatgcttggagccttggtcgccatgtatgagcacaagatcttcgttcagggcatcatctgggacatcaacagctttgaccagtggggagtggagctgggaaagcagctggctaagaaaatagagcctgagcttgatggcagtgctcaagtgacctctcacgacgcttctaccaatgggctcatcaacttcatcaagcagcagcgcgaggccagagtccaataaactcgtgctcatctgcagcctcctctgtgactcccctttctcttctcgtccctcctccccggagccggcactgcatgttcctggacaccacccagagcaccctctggttgtgggcttggaccacgagcccttagcagggaaggctggtctcccccagcctaacccccagcccctccatgtctatgctccctctgtgttagaattggctgaagtgtttttgtgcagctgacttttctgacccatgttcacgttgttcacatcccatgtagaaaaacaaagatgccacggaggaggt

SEQ ID NO: 26 - DNA, 1374 bp, Homo sapiens
gaataagccttcgataattatgaagggtgtttcggtatcttccctccaaaatgctaagaaataatttaggcaacagttcagactctaaaaatgaagatggctcggtcttttcacagactgaacacaatattgttgcaacttacttgattatggcaggtatgataagtattatcagcaacataatagttctgggcatcttcattaagtacaaggaacttcggacacccacaaatgcaattattattaacctggctgttactgatataggggtcagtagcattggctatcccatgtctgctgcctcagatctgtatggaagttggaaatttggatacgcaggctgtcaggtttatgctggattgaatattttttttggaatggcaagcattggattactcacggtcgtggctgtggaccgatacctgaccatctgccttcctgacgtagggagaagaatgaccaccaacacttacatcggcttgattctgggagcctggatcaatggcctgttttgggctttgatgcctatcatagggtgggctagttatgccccagatcctactggtgctacgtgtaccataaactggaggaaaaatgatagatcttttgtgtcttacaccatgacagttattgcgataaattttattgtgcccttgacagtgatgttttactgctattaccatgtcacgctatccattaaacatcacactaccagtgactgcactgagtccctcaacagagactggtcagatcagatagatgtaacaaagatgtctgtgatcatgatctgcatgtttctggtggcatggtccccttattccatcgtgtgcttatgggcttcttttggtgacccaaagaagattcctccccccatggccatcatagctccactgtttgcaaaatcttctacattctataacccctgcatttatgtggttgctaataaaaagtttcggagggcaatgcttgccatgttcaaatgtcagactcaccaaacaatgcctgtgacaagtattttacccatggatgtatctcaaaacccattggcttctggaagaatctgaaataagagaaaaggacacgctatcaaaacactttagttttttgacaatgcttttcttttaaatatgagcccatttagatcaagtgcagacatggatcattgtcctatgagagtgtaagctcctcaagcacagctcgtgcttccgtttgtgcactctggctgctgtagtgtatgcttctctgtgtcctgatatatcaacttattgctcatctcctttgatgaattaggcatcagaggttaaggtcccctttctttctccctattatggcatgcattacactgtactgatgacctttaacttgcctggctcc

SEQ ID NO: 27 - DNA, 2513 bp, Homo sapiens
gtcactcagcctatggagatgaagaaactgaggttcagagaggttaagagactccactgaggtcacacagccgatgacagacaaccttctgtgccttcatcaagctggttgtgtacccaccatgtccctggcgacaggattgggaaagaaaaagccctaattaaggatcgtcagaaaccacagttggaggaggacggcagagacagtttccctccccgctataccaacacccttccttcgaggtcctcgctcctgagggaccctggactgtcacagagattaatgaccccttattttctttggatgtgaaaggaaatcactggttaaagcttgatcgagagacattatcagctctttaaggattgcaggagaataggctactttattttctgaaaaggtaaatatatgcaagcaaagccaacatgccacgaatggcgttggtctaccacacagccgtgtctgggacacagttgggggtcatcccccagcaggagtgaagtcgagcttagcggcccttgtgtcctcccttggaattcctgccatcccttttgattgagcctccacctctgggatttttcttccatttttctcctctcttaggagggagttcctgctacccatcgtgggaggccaccatcaggactgcgaagatggtgaccctgcggaagaggaccctgaaagtgctcaccttcctcgtgctcttcatcttcctcacctccttcttcctgaactactcccacaccatggtggccaccacctggttccccaagcagatggtcctggagctctccgagaacctgaagagactgatcaagcacaggccttgcacctgcacccactgcatcgggcagcgcaagctctcggcctggttcgatgagaggttcaaccagaccatgcagccgctgctgactgcccagaacgcgctcttggaggacgacacctaccgatggtggctgaggctccagcgggagaagaagcccaataacttgaatgacaccatcaaggagctgttcagagtggtgcctgggaatgtggaccctatgctggagaagaggtcggtgggctgccggcgctgcgctgtggtgggcaactcgggcaacctgagggagtcttcttatgggcctgagatagacagtcacgactttgtcctcaggatgaacaaggcgcccacggcagggtttgaagctgatgttgggaccaagaccacccaccatctggtgtaccctgagagcttccgggagctgggagataatgtcagcatgatcctggtgcccttcaagaccatcgacttggagtgggtggtgagcgccatcaccacgggcaccatttcccacacctacatcccggttcctgcaaagatcagagtgaaacaggataagatcctgatctaccacccagccttcatcaagtatgtctttgacaactggctgcaagggcacgggcgatacccatctaccggcatcctctcggtcatcttctcaatgcatgtctgcgatgaggtggacttgtacggcttcggggcagacagcaaagggaactggcaccactactgggagaacaacccatccgcgggggcttttcgcaagacgggggtgcacgatgcagactttgagtctaacgtgacggccaccttggcctccatcaataaaatccggatcttcaaggggagatgacgcagtgaagggctgaggatggacgcactgtcacacctctgcatttccagccccagcatcttgctggagccgttccatcccggagcttggaggggcagcctcaggtgtgtgcctgggcaccgctcacagcctcttgcacccagccgttgacagcatctactcagcaaggtcactaagctctgccagcgtggcagagcatgtcttggaacctgtcttgagtgggacaacgtccccccactgctgccctagagctggggagacgctcagggaaaggttcaacctccacacactaaaatcatttgctcctgggcaagcttgggaatgaatgtggaagatcctatattctgagagacaggacagtttcccaggaagatgggcagagacttgagtggcgattacctccagcacagagacgtgccaggcggtgttggcgctcggggcgagatgctgcccttcttttgcacgaagcctggcctcttgcttggcgtgataaccctgtcatcttcccaaagctcatttatgagccaccagaggctcctaccccaaagatttcacagaaacttgaggccaggtgccgtggctcacacctgtaatctgaacactttgggaggccgaggcgggaggatcacttgagcccaggagttcaagaccagcctgggcaacatagtgagactcctgtctctacaaaaataaaagatttaaaaaaattagccaggcacggtggcacacacttgtagccccagctactagggaggctgaggagggaggatctcttgtgcctaggagttcgaggctgcagtgggctgtgatcacaccactgcactccagcctgggaacaag

SEQ ID NO: 28 - DNA, 1737 bp, Homo sapiens
gtggtcaccttccccagctagaaagccttctttttatatcaacttccttttaattatgaagtattacaatcaagcataaagacataataaatgttaacatctttcctttgtgtctgtttaaaaaatgtttcttattacagaaaatttcaaatagatttaaagtagagaaatgcacgtgatgaaaccccatgcacttgccattccatttcaatagttattacttcacggaagagttggcaatgatgagaacatgtcaaacacctggaaattcctgtctcattcaacagactcactaaataaaatcagcaaggtcaatgagtcaacagaatcacttactgatgagggtacagacatgaatgaaggacaactactgggagactttgagattgagtccaaacagctggaagcagagtcttggagtcggataatagacagcaagtttctaaaacagcaaaagaaagatgtggtcaaacggcaagaagtaatatatgagttgatgcagacagagtttcatcatgtccgcactctcaagatcatgagtggtgtgtacagccaggggatgatggcagatctgctttttgagcagcagatggtagaaaagctgttcccctgtttggatgagctgatcagtatccatagccaattcttccagaggattctggagcggaagaaggagtctctggtggataaaagtgaaaagaactttctcatcaagaggataggggatgtgcttgtaaatcagttttcaggtgagaatgcagaacgtttaaagaagacatatggcaagttttgtgggcaacataaccagtctgtaaactacttcaaagacctttatgccaaggataagcgttttcaagcctttgtaaagaagaagatgagcagttcagttgttagaaggcttggaattccagagtgcatattgcttgtaactcagcggattaccaagtacccagttttattccaaagaatattgcagtgtaccaaagacaatgaagtggagcaggaagatctagcacagtccttgagcctggtgaaggatgtgattggagctgtagacagcaaagtggcaagttatgaaaagaaagtgcgtctcaatgagatttatacaaagacagatagcaagtcaatcatgaggatgaagagtggtcagatgtttgccaaggaagatttgaaacggaagaagcttgtacgtgatgggagtgtgtttctgaagaatgcagcaggaaggttgaaagaggttcaagcagttcttctcactgacattttagttttccttcaagaaaaagaccagaagtacatctttgcatcattggaccagaagtcaacagtgatctctttaaagaagctgattgtgagagaagtggcacatgaggagaaaggtttattcctgatcagcatggggatgacagatccagagatggtagaagtccatgccagctccaaagaggaacgaaacagctggattcagatcattcaggacacaatcaacaccctttccgggaatggatggaggtgctttaactgatgcgagtctcacagagtcctatttcagcaccagctttattggagtcaatggatttggaagccctgtagaaacaaagtatcccttgatgcagtacactctggttgtcttccaacgtcttcgggtctgcacctctggattcagcaataccaaaaacaccggcccccaaacttcccacctacttgaaccaataaacttcctcttgtgtttaaact

SEQ ID NO: 29 - DNA, 629 bp, Homo sapiens
tgggagggagccatgaagcattacgaggtggagattctggacgcaaagacaagggagaagctgtgtttcttcgccgcgtggatggcctattacatcaatcaccctctctacactccccctacctacggagctcagcaggtgaaactggcgctcgccatctttgtgatctgccagctcggcaacttctccatccacatggccctgcgggacctgcggcccgctgggtccaagacgcggaagatcccataccccaccaagaaccccttcacgtggctcttcctgctggtgtcctgccccaactgcacctacgaggtggggtcctggatcggtttcgccatcatgacgcagtgtctcccagtggccctgttctccctggtgggcttcacccagatgaccatctgggccaagggcaagcaccgcagctacctgaaggagttccgggactacccgcccctgcgcatgcccatcatccccttcctgctctgagcagctcacccctgctgaggctcagcccctcaacccggtggcattctgggggaggagtggggcccacagctctccagcacccggaataaagcccgcctgtccccagtcggaacaaaaaaaaaaaaaaaaaaaaaaaaaaaaaa

SEQ ID NO: 30 - DNA, 3113 bp, Homo sapiens
aaaaagtacagagtccagggaaaagacttgcttgtaactttatgaattctggatttttttttttcctttgctttttcttaactttcactaagggttactgtagtctgatgtgtccttcccaaggccacgaaatttgacaagctgcacttttcttttgctcaatgatttctgctttaagccaaagaactgcctataatttcactaagaatgtcttctaattcagatactggggatttacaagagtctttaaagcacggacttacacctattgtgtctcaatttaaaatggtgaattactcctatgatgaagatctggaagagctttgtcccgtgtgtggagataaagtgtctgggtaccattatgggctcctcacctgtgaaagctgcaagggattttttaagcgaacagtccaaaataataaaaggtacacatgtatagaaaaccagaactgccaaattgacaaaacacagagaaagcgttgtccttactgtcgttttcaaaaatgtctaagtgttggaatgaagctagaagctgtaagggccgaccgaatgcgtggaggaaggaataagtttgggccaatgtacaagagagacagggccctgaagcaacagaaaaaagccctcatccgagccaatggacttaagctagaagccatgtctcaggtgatccaagctatgccctctgacctgaccatttcctctgcaattcaaaacatccactctgcctccaaaggcctacctctgaaccatgctgccttgcctcctacagactatgacagaagtccctttgtaacatcccccattagcatgacaatgccccctcacggcagcctgcaaggttaccaaacatatggccactttcctagccgggccatcaagtctgagtacccagacccctataccagctcacccgagtccataatgggctattcatatatggatagttaccagacgagctctccagcaagcatcccacatctgatactggaacttttgaagtgtgagccagatgagcctcaagtccaggctaaaatcatggcctatttgcagcaagagcaggctaaccgaagcaagcacgaaaagctgagcacctttgggcttatgtgcaaaatggcagatcaaactctcttctccattgtcgagtgggccaggagtagtatcttcttcagagaacttaaggttgatgaccaaatgaagctgcttcagaactgctggagtgagctcttaatcctcgaccacatttaccgacaagtggtacatggaaaggaaggatccatcttcctggttactgggcaacaagtggactattccataatagcatcacaagccggagccaccctcaacaacctcatgagtcatgcacaggagttagtggcaaaacttcgttctctccagtttgatcaacgagagttcgtatgtctgaaattcttggtgctctttagtttagatgtcaaaaaccttgaaaacttccagctggtagaaggtgtccaggaacaagtcaatgccgccctgctggactacacaatgtgtaactacccgcagcagacagagaaatttggacagctacttcttcgactacccgaaatccgggccatcagtatgcaggctgaagaatacctctactacaagcacctgaacggggatgtgccctataataaccttctcattgaaatgttgcatgccaaaagagcataagttacaacccctaggagctctgctttcaaaacaaaaagagattgggggagtggggagggggaagaagaacaggaagaaaaaaagtactctgaactgctccaagcaacgctaattaaaaacttgctttaaagatattgaatttaaaaaggcataataatcaaatacttaatagcaaataaatgatgtatcagggtatttgtattgcaaactgtgaatcaaaggcttcacagccccagaggattccatataaaagacattgtaatggagtggattgaactcacagatggataccaacacggtcagaagaaaaacggacagaacggttcttgtatatttaaactgatctccactatgaagaaatttaggaactaatcttattaattaggcttatacagcgggggatttgagcttacaggattcctccatggtaaagctgaactgaaacaattctcaagaatgcatcagctgtacctacaatagcccctccctcttcctttgaaggcccgagcacctctgccctgtggtcaccgaatctgtactaaggacctgtgttcagccacacccagtggtagctccaccaaatcatgaacagcctaattttgagtgtctgtgtcttagacctgcaaacagctaataggaaattctattaatatgttagcttgccattttaaatatgttctgagggttgttttgtctcgtgttcatgatgttaagaaaatgcaggcagtatccctcatcttatgtaagtgtgaattaatattaagggaaatgactacaaactttcaaagcaaatgctccatagctaaagcaacttagaccttatttctgctactgttgctgaaatgtggctttggcattgttggatttcataaaaaatttctggcaggaagtcttgttagtatacatcagtctttttcatcatccaagtttgtagttcatttaaaaatacaacattaaacacattttgctaggatgtcaaatagtcacagttctaagtagttggaaacaaaattgacgcatgttaatctatgcaaagagaaaggaaaggatgaggtgatgtattgactcaaggttcattcttgctgcaattgaacatcctcaagagttgggatggaaatggtgatttttacatgtgtcctggaaagatattaaagtaattcaaatcttccccaaaggggaaaggaagagagtgatactgacctttttaagtcatagaccaaagtctgctgtagaacaaatatgggaggacaaagaatcgcaaattcttcaaatgactattatcagtattattaacatgcgatgccacaggtatgaaagtcttgccttatttcacaattttaaaaggtagctgtgcagatgtggatcaacatttgtttaaaataaagtattaatactttaaagtcaaaaaaaaaaaaaaa

SEQ ID NO: 31 - DNA, 5190 bp, Homo sapiens
ccagaagttctccagggcttccgcagagcactttttcgctgcctgtgagctgcagcgcgggagagctcgggctcgcgcggaccccagcgcctggcaggctgacagcgctctctcgccccaggtgcccgcgcgcgtggtgagcagctgcaccaggtggcgtccggggtggggtcaatgaagtgcagcctgaggaagatgtggcgccctggagaaaagaaggagccccagggcgttgtctatgaggatgtgccggacgacacggaggatttcaaggaatcgcttaaggtggtttttgaaggaagtgcatatggattacaaaactttaataagcaaaagaaattaaaaacatgtgacgatatggacaccttcttcttgcattatgctgcagcagaaggccaaattgagctaatggagaagatcaccagagattcctctttggaagtgctgcatgaaatggatgattatggaaatacccctctgcattgtgctgtagaaaaaaaccaaattgaaagcgttaagtttcttctcagcagaggagcaaacccaaacctccgaaacttcaacatgatggctcctctccacatagctgtgcagggcatgaataatgaggtgatgaaggtcttgcttgagcatagaactattgatgttaatttggaaggagaaaatggaaacacagctgtgatcattgcgtgcaccacaaataatagcgaagcattgcagattttgcttaacaaaggagctaagccatgtaaatcaaataaatggggatgtttccctattcaccaagctgcattttcaggttccaaagaatgcatggaaataatactaaggtttggtgaagagcatgggtacagtagacagttgcacattaactttatgaataatgggaaagccacccctctccacctggctgtgcaaaatggtgacttggaaatgatcaaaatgtgcctggacaatggtgcacaaatagacccagtggagaagggaaggtgcacagccattcattttgctgccacccagggagccactgagattgttaaactgatgatatcgtcctattctggtagcgtggatattgttaacacaaccgatggatgtcatgagaccatgcttcacagagcttcattgtttgatcaccatgagctagcagactatttaatttcagtgggagcagatattaataagatcgattctgaaggacgctctccacttatattagcaactgcttctgcatcttggaatattgtaaatttgctactctctaaaggtgcccaagtagacataaaagataattttggacgtaattttctgcatttaactgtacagcaaccttatggattaaaaaatctgcgacctgaatttatgcagatgcaacagatcaaagagctggtaatggatgaagacaacgatgggtgtactcctctacattatgcatgtagacaggggggccctggttctgtaaataacctacttggctttaatgtgtccattcattccaaaagcaaagataagaaatcacctctgcattttgcagccagttatgggcgtatcaatacctgtcagaggctcctacaagacataagtgatacgaggcttctgaatgaaggtgaccttcatggaatgactcctctccatctggcagcaaagaatggacatgataaagtagttcagcttcttctgaaaaaaggtgcattgtttctcagtgaccacaatggctggacagctttgcatcatgcgtccatgggcgggtacactcagaccatgaaggtcattcttgatactaatttgaagtgcacagatcgcttggatgaagacgggaacactgcacttcactttgctgcaagggaaggccacgccaaagccgttgcgcttcttctgagccacaatgctgacatagtcctgaacaagcagcaggcctcctttttgcaccttgcacttcacaataagaggaaggaggttgttcttacgatcatcaggagcaaaagatgggatgaatgtcttaagattttcagtcataattctccaggcaataaatgtccaattacagaaatgatagaatacctccctgaatgcatgaaggtacttttagatttctgcatgttgcattccacagaagacaagtcctgccgagactattatatcgagtataatttcaaatatcttcaatgtccattagaattcaccaaaaaaacacctacacaggatgttatatatgaaccgcttacagccctcaacgcaatggtacaaaataaccgcatagagcttctcaatcatcctgtgtgtaaagaatatttactcatgaaatggttggcttatggatttagagctcatatgatgaatttaggatcttactgtcttggtctcatacctatgaccattctcgttgtcaatataaaaccaggaatggctttcaactcaactggcatcatcaatgaaactagtgatcattcagaaatactagataccacgaattcatatctaataaaaacttgtatgattttagtgtttttatcaagtatatttgggtattgcaaagaagcggggcaaattttccaacagaaaaggaattattttatggatataagcaatgttcttgaatggattatctacacgacgggcatcatttttgtgctgcccttgtttgttgaaataccagctcatctgcagtggcaatgtggagcaattgctgtttacttctattggatgaatttcttattgtatcttcaaagatttgaaaattgtggaatttttattgttatgttggaggtaattttgaaaactttgttgaggtctacagttgtatttatcttccttcttctggcttttggactcagcttttacatcctcctgaatttacaggatcccttcagctctccattgctttctataatccagaccttcagcatgatgctaggagatatcaattatcgagagtccttcctagaaccatatctgagaaatgaattggcacatccagttctgtcctttgcacaacttgtttccttcacaatatttgtcccaattgtcctcatgaatttacttattggtttggcagttggcgacattgctgaggtccagaaacatgcatcattgaagaggatagctatgcaggtggaacttcataccagcttagagaagaagctgccactttggtttctacgcaaagtggatcagaaatccaccatcgtgtatcccaacaaacccagatctggtgggatgttattccatatattctgttttttattttgcactggggaaataagacaagaaataccaaatgctgataaatctttagaaatggaaatattaaagcagaaataccggctgaaggatcttacttttctcctggaaaaacagcatgagctcattaaactgatcattcagaagatggagatcatctctgagacagaggatgatgatagccattgttcttttcaagacaggtttaagaaagagcagatggaacaaaggaatagcagatggaatactgtgttgagagcagtcaaggcaaaaacacaccatcttgagccttagctcctcagaccttcagtgaggcttctaatggggggtgcatgacttgctggttctaactttcaatttaaaaagagtgaggaagaagcagaatgattgattttactgcgtgtgaaatcatggttcctgcatgctatataaaagtaaaccatcttttatcctctattcatattttctaccaatcactatgtattggggatatctttgcagatatgttcaaattggactggactttgatgagatataatctcattatttgaatgggtagaaaatgaatttgctagaacacacatttttaatgaaaagaagtaataaatgtaactattaagctaaaatgcaaatgtcagtactgaattcctgcttgttaattacataatatgtgatgctctagaaaatagtcacaagtattaataatgccttagatgatagtcttaaatattaggttgaggtctacctaacctaagctgcttcctggaaagcttcatgttgaaagaacctatgggtggcaccatgtggacttttctgtccctactgtgatgaatagccccacccttcttgctgtccccaacacacctgatgtcactttgagccatatagttgaagtacaaattaataggccttatgatatgcacgaattttactatagataatatatgttgtttctggttttgtttgccaatgagcataataaatgtaaaacctatatagtatccctgtgattattgtatgagcctttgtttgagatttgaaaaaaacatggctccatcacatattcccttttttcttttgatgtctactcaaatcatgaattaatcacatacctcatcattaatcttttcaaggtccttctattgttttgtctgattttctccatcatcctgattagcatgtttattccctcactacccccaggagatattcactgtaatgaatatgtctttggctatgtatgtgtccttgtgttatgttgtacagtgttgttttgagtctgttattatttacacagatgttattatgctatagcttctatttctgtttttgcttcttatttctcttataattctcacttatttcctattttttctactcatttctatttgttactcctttttactggacatgatgtttacaagatacaactgtgttactgtattccatctagtacggggcctttggtgtggcttactatttcattgtgtgcacccacccacccaccacactggacttttctagagatggacagcttggttacctccaccttcctgcactcattctcaaacatactgatgttcatacaaaccagcagagtgctgagggacgatatgtactattacaaaaccagacacttttacattcatggtccaacagaacacatggcctagaggcaatgttgcatataccttaatctttgatatgaataatatctttgttctttatatttcttaaaacagaaagggtggaaaatcactatacagaagcaatatccaaagatctcctgatcataaagacaaggggtcttttcagtcttccctctcctcaaaccttgtgtagcattgcacaatatagatctcagtcaacattcactgagtgccaagaatgtgagaaacactgtaccatgcctgtcatgcgaaatatttaaataaacagattgtcttacag

SEQ ID NO: 32 - DNA, 2657 bp, Homo sapiens
tgggaacacaaacttgctggcgggaagagcccggaaagaaacctgtggatctcccttcgagatcatccaaagagaagaaaggtgacctcacattcgtgccccttagcagcactctgcagaaatgcctcctcagctgcaaaacggcctgaacctctcggccaaagttgtccagggaagcctggacagcctgccccaggcagtgagggagtttctcgagaataacgctgagctgtgtcagcctgatcacatccacatctgtgacggctctgaggaggagaatgggcggcttctgggccagatggaggaagagggcatcctcaggcggctgaagaagtatgacaactgctggttggctctcactgaccccagggatgtggccaggatcgaaagcaagacggttatcgtcacccaagagcaaagagacacagtgcccatccccaaaacaggcctcagccagctcggtcgctggatgtcagaggaggattttgagaaagcgttcaatgccaggttcccagggtgcatgaaaggtcgcaccatgtacgtcatcccattcagcatggggccgctgggctcacctctgtcgaagatcggcatcgagctgacggattcgccctacgtggtggccagcatgcggatcatgacgcggatgggcacgcccgtcctggaagcactgggcgatggggagtttgtcaaatgcctccattctgtggggtgccctctgcctttacaaaagcctttggtcaacaactggccctgcaacccggagctgacgctcatcgcccacctgcctgaccgcagagagatcatctcctttggcagtgggtacggcgggaactcgctgctcgggaagaagtgctttgctctcaggatggccagccggctggcagaggaggaagggtggctggcagagcacatgctgattctgggtataaccaaccctgagggtgagaagaagtacctggcggccgcatttcccagcgcctgcgggaagaccaacctggccatgatgaaccccagcctccccgggtggaaggttgagtgcgtcggggatgacattgcctggatgaagtttgacgcacaaggtcatttaagggccatcaacccagaaaatggctttttcggtgtcgctcctgggacttcagtgaagaccaaccccaatgccatcaagaccatccagaagaacacaatctttaccaatgtggccgagaccagcgacgggggcgtttactgggaaggcattgatgagccgctagcttcaggcgtcaccatcacgtcctggaagaataaggagtggagctcagaggatggggaaccttgtgcccaccccaactcgaggttctgcacccctgccagccagtgccccatcattgatgctgcctgggagtctccggaaggtgttcccattgaaggcattatctttggaggccgtagacctgctggtgtccctctagtctatgaagctctcagctggcaacatggagtctttgtgggggcggccatgagatcagaggccacagcggctgcagaacataaaggcaaaatcatcatgcatgacccctttgccatgcggcccttctttggctacaacttcggcaaatacctggcccactggcttagcatggcccagcacccagcagccaaactgcccaagatcttccatgtcaactggttccggaaggacaaggaaggcaaattcctctggccaggctttggagagaactccagggtgctggagtggatgttcaaccggatcgatggaaaagccagcaccaacgtcacgcccataggctacatccccaaggaggatgccctgaacctgaaaggcctggggcacatcaacatgatggagcttttcagcatctccaaggaattctgggacaaggaggtggaagacatcgagaagtatctggtggatcaagtcaatgccgacctcccctgtgaaatcgagagagagatccttgccttgaagcaaagaataagccagatgtaatcagggcctgagaataagccagatgtaatcagggcctgagtgctttacctttaaaatcattaaattaaaatccataaggtgcagtaggagcaagagagggcaagtgttcccaaattgacgccacctaataatcatcaccacaccgggagcagatctgaaggcacactttgatttttttaaggataagaaccacagaacactgggtagtagctaatgaaattgagaagggaaatcttagcatgcctccaaaaattcacatccaatgcatactttgttcaaatttaaggttactcaggcattgatcttttcagtgttttttcacttagctatgtggattagctagaatgcacaccaaaaagatacttgagctgtatatatatatgtgtgtgtgtgtgtgtgtgtgtgtgtgtgtgcatgtatgtgcacatgtgtctgtgtgatatttggtatgtgtatttgtatgtactgttattcaaaatatatttaatacctttggaaaatcttgggcaagatgacctactagttttccttgaaaaaaagttgctttgttattaatattgtgcttaaattatttttatacaccattgttccttacctttacataattgcaatatttcccccttactacttcttggaaaaaaattagaaaatgaagtttatagaaaag

SEQ ID NO: 33 - DNA, 468 bp, Homo sapiens
  modified_base (6)..(6): a, c, g, or t
  modified_base (9)..(10): a, c, g, or t
  modified_base (12)..(12): a, c, g, or t
  modified_base (15)..(15): a, c, g, or t
  modified_base (18)..(18): a, c, g, or t
  modified_base (30)..(30): a, c, g, or t
  modified_base (33)..(33): a, c, g, or t
  modified_base (36)..(36): a, c, g, or t
  modified_base (39)..(39): a, c, g, or t
  modified_base (42)..(42): a, c, g, or t
  modified_base (45)..(45): a, c, g, or t
  modified_base (51)..(51): a, c, g, or t
  modified_base (57)..(57): a, c, g, or t
  modified_base (60)..(60): a, c, g, or t
  modified_base (71)..(72): a, c, g, or t
  modified_base (75)..(75): a, c, g, or t
  modified_base (78)..(78): a, c, g, or t
  modified_base (93)..(93): a, c, g, or t
  modified_base (99)..(99): a, c, g, or t
  modified_base (129)..(129): a, c, g, or t
  modified_base (132)..(132): a, c, g, or t
  modified_base (135)..(135): a, c, g, or t
  modified_base (138)..(138): a, c, g, or t
  modified_base (148)..(150): a, c, g, or t
  modified_base (153)..(153): a, c, g, or t
  modified_base (156)..(156): a, c, g, or t
  modified_base (159)..(159): a, c, g, or t
  modified_base (291)..(291): a, c, g, or t
  modified_base (294)..(294): a, c, g, or t
  modified_base (318)..(318): a, c, g, or t
  modified_base (321)..(321): a, c, g, or t
  modified_base (331)..(331): a, c, g, or t
  modified_base (333)..(333): a, c, g, or t
  modified_base (339)..(339): a, c, g, or t
  modified_base (384)..(384): a, c, g, or t
  modified_base (387)..(387): a, c, g, or t
  modified_base (405)..(405): a, c, g, or t
  modified_base (414)..(414): a, c, g, or t
  modified_base (448)..(448): a, c, g, or t
  modified_base (451)..(451): a, c, g, or t
  modified_base (454)..(454): a, c, g, or t
  modified_base (458)..(458): a, c, g, or t
atggtncanntnacnccngtggagaagtcngcngtnacngcnctntggggnaaggtnaangtggatgaagnnggnggngaggccctgggcagnctgctngtggtctacccttggacccagaggttcttngantcnttnggggatctgnnnacnccngangcagttatgggcaaccctaaggtgaaggctcatggcaagaaagtgctcggtgcctttagtgatggcctggctcacctggacaacctcaagggcacctttgccacactgagtgagctgcactgtgacaagctncangtggatcctgagaacttcaggctnctnggcaacgtgntngtctgngtgctggcccatcactttggcaaagaattcaccccaccagtgcangcngcctatcagaaagtggtngctggtgtngctaatgccctggcccacaagtatcactaagctngcnttnttgntgtccaattt

SEQ ID NO: 34 - DNA, 2148 bp, Homo sapiens
gactgggtttgttgtgaagttgcggtgatccagcgcagagccccgtcctgattgatcgcatcgcggggctcagatgactgtaaaatgaatagatgaaattcttgcttctcgaagattttcttgggcatctcccggaaagtgcgttttaaggcgaagtcatgatgtattctcccatctgtctcactcaggatgaatttcacccattcatcgaggcacttcttccacatgtccgtgcaattgcctatacttggttcaacctgcaggctcgaaaacgcaagtactttaaaaagcatgagaagcgaatgtcaaaggatgaagaaagagcagtcaaagatgagcttctcagtgaaaagcctgaaatcaaacagaagtgggcatccaggctccttgccaaactgcgcaaagatattcgccaggagtatcgagaggactttgtgctcaccgtgactggcaagaagcacccgtgctgtgtcttatccaatcccgaccagaagggtaagattaggagaatcgactgcctgcgacaggcagacaaagtctggcgtctggatctagtcatggtgatcctgttcaaaggcatccccttggaaagtaccgatggagagcggctcatgaaatccccacattgcacaaacccagcactttgtgtccagccacatcatatcacagtatcagttaaggagcttgatttgtttttggcatactacgtgcaggagcaagattctggacaatcaggaagtccaagccacaatgatcctgccaagaatcctccaggttaccttgaggatagttttgtaaaatctggagtcttcaatgtatcagaacttgtaagagtatccagaacgcccataacccagggaactggagtcaacttcccaattggagaaatcccaagccaaccatactatcatgacatgaactcgggggtcaatcttcagaggtctctgtcttctccaccaagcagcaaaagacccaaaactatatccatagatgaaaatatggaaccaagtcctacaggagacttttacccctctccaagttcaccagctgctggaagtcgaacatggcacgaaagagatcaagatatgtcttctccgactactatgaagaagcctgaaaagccattgttcagctctgcatctccacaggattcttccccaagactgagcactttcccccagcaccaccatcccggaatacctggagttgcacacagtgtcatctcaactcgaactccacctccaccttcaccgttgccatttccaacacaagctatccttcctccagccccatcgagctacttttctcatccaacaatcagatatcctccccacctgaatcctcaggatactctgaagaactatgtaccttcttatgacccatccagtccacaaaccagccagtcctggtacctgggctagcttggttcctttccaagtgtcaaataggacacccatcttaccggccaatgtccaaaattacggtttgaacataattggagaacctttccttcaagcagaaacaagcaactgagggaaaaagaaacacaacaatagtttaagaaattttttttttaaataaaaaaaaaggaaaagaggaagactggacaaaacaacacaaaggcagaaaggaaagaaactgaagaaagaagataatagaccagcaattgcagcacttacaatcactaattcccttaaggttgaaactgtaatgacataaaaagggtcgatgatatttcactgatggtagatcgcagcccctgcaacgtagcctttgttacatgaagtccgctgggaaatagatgttctgtctctatgacaatatattttaactgactttctagatgccttaatatttgcatgataagctagttttattggtttagtattcttgttgtttacgcatggaatcactattcctggttatctcaccaacgaaggctaggaggcggcgtcagaggtgctgggtgacagagccatgagccagccattttataagcactctgatttctaaaagttaaaaaaaatatatgaaatctctgtagcctttagttatcagtacagatttattaaatttcggcccttaacccagccttttccagtgtgtaacccagtttgaaatcttaaaaaaagaaaaaaaaaaaaaaaa

SEQ ID NO: 35 - DNA, 488 bp, Homo sapiens
cagactcagagagaacccaccatggtgctgtctcctgccgacaagaccaacgtcaaggccgcctggggtaaggtcggcgcgcacgctggcgagtatggtgcggaggccctggagaggatgttcctgtccttccccaccaccaagacctacttcccgcacttcgacctgagccacggctctgcccaggttaagggccacggcaagaaggtggccgacgcgctgaccaacgccgtggcgcacgtggacgacatgcccaacgcgctgtccgccctgagcgacctgcacgcgcacaagcttcgggtggacccggtcaacttcaagctcctaagccactgcctgctggtgaccctggccgcccacctccccgccgagttcacccctgcggtgcacgcctccctggacaagttcctggcttctgtgagcaccgtgctgacctccaaataccgttaagctggagcctcggtggccatgcttcttgccccttgggc

SEQ ID NO: 36 - DNA, 2566 bp, Homo sapiens
cgctttttttttttttttctttttttgagatggagcttgctctgtcacccaggctggagtgcagtggcacgatcacagctcactgcaacttccgccacctgggttcaagcaattttcctgcttcaacctcccgagtagttgagattacaggcacgtgccaccacacctgactgatttttgtatttttagtagagacagggtttcaccatgttggccaggctggtcttgaactcctgacctcaagtgatccacccacctcagtctaccaaagtgctgggattacaggttgtgagccactgcacccggcctctgtctgacttttaaatgatggagtatcccagaggtcaggctttagagctcttctttcttccatctacagagtgctcatttctttggtgatctcattcagtctcacggctttgaatgttatatgctgataagtcccaactttctctgtctcgcctaaacttcccctaatagcagaacctgatatcaaagtgcctatttgacatctccacttagatatctaataagcatctttaatgtaaaatttccaaaactgagctcctacaattccctcccacacttgttcagttttccccatctaagctaatggcaactccatccctccagttgctttggccaaaacttttgagttgtctttgactgctttttttctcccttcttacattgtgctcatcctttctttcaggcaaattctgtttggtataccttcaaatatatctagaattctatacttctcactacccctcattcccattatctttgaaacacactccaatgaggtttttacccccactattccaccaaaaacactcttgtgaaagtcaccagatgatggttcttcaggctatcatctgtctcctgaattattttaagagcctccctaactggtctccttgttccagcccctgctcccttcactctattctcaatacaacagtcagagggatcttataaaaccgtaagtcagatcatataattctgtgtgaaaccctccaatgttatcccacttcagagtaaaagttaaagggtttattttgatctctaaatattttgatccctatgatctagtctcttcttacccaaagtatgggcctcataccagcagaactggcattctctgggagcttgttagaaatgtagaatctctggtcctaagattttctaaatcagaatctgcattttcatcagctctcttggcaattcatatgtttgagaaggactgatgtagtcctctactgcctctcctgctgctatgtgctgctctagtcacactgtcctcctggctatttcgataagatggaaactctcctgcctcagggcttttgcacctactgctccctctgtctaggataatcttccccagaaaactgcatgccagttgccttatttccttcaggtctttattgaagtcactttctcattaaacactttctggcccatcctgtctaaaactgcatccccaaacccttcctatcccttttctccacttttttctttttttaaactatagttcttatcaacatagtatatgttttgcttatttatcctgtttattgtctgactcaacaagtataatttgacaaagaaaaatgatacttctctttttttgctgttccaccaaatacaattcaaatgctttttgttttatttttttaccaattccaatttcaaaatgtctcaatggtgctataataaataaacttcaacactctttatgataacaacactgtgttatattctttgaatcctagcccatctgcagagcaatgactgtgctcaccagtaaaagataacctttctttctgaaatagtcaaatacgaaattagaaaagccctccctattttaactacctcaactggtcagaaacacagattgtattctatgagtcccagaagatgaaaaaaattttatacgttgataaaacttataaatttcattgattaatctcctggaagattggtttaaaaagaaaagtgtaatgcaagaatttaaagaaatatttttaaagccacaattattttaatattggatatcaactgcttgtaaaggtgctcctcctttttcttgtcattgctggtcaagattactaatatttgggaaggctttaaagacgcatgttatggtgctaatgtactttcacttttaaactctagatcagaattgttgacttgcattcagaacataaatgcacaaaatctgtacatgtctcccatcagaaagattcattggcatgccacaggggattctcctccttcatcctgtaaaggtcaacaataaaaaccaaattatggggctgcttttgtcacactagcatagagaatgtgttgaaatttaactttgtaagcttgtatgtggttgttgatcttttttttccttacagacacccataataaaatatcatattaaaaaaaaaaaaaaaaaaaaaaaaaaaaaaaaaaaaaaaaaaaaaaaaaaaaaaaaaaaaaaaaaaaaaaaaaaaaaaaaaaaaaaaaaaaaaaaaaaaaaaaaaaaaaaaaaaaaaaaaaaaaaaaaaaaaaa

SEQ ID NO: 37 - DNA, 2148 bp, Homo sapiens; identical to SEQ ID NO: 34

SEQ ID NO: 38 - DNA, 488 bp, Homo sapiens; identical to SEQ ID NO: 35

SEQ ID NO: 39 - DNA, 2566 bp, Homo sapiens; identical to SEQ ID NO: 36

SEQ ID NO: 40 - DNA, 581 bp, Homo sapiens
acaactgtgttcactagcaacctcaaacagacaccatggtgcacctgactcctgaggagaagtctgccgttactgccctgtggggcaaggtgaacgtggatgaagttggtggtgaggccctgggcaggctgctggtggtctacccttggacccagaggttctttgagtcctttggggatctgtccactcctgatgctgttatgggcaaccctaaggtgaaggctcatggcaagaaagtgctcggtgcctttagtgatggcctggctcacctggacaacctcaagggcacctttgccacactgagtgagctgcactgtgacaagctgcacgtggatcctgagaacttcaggctcctgggcaacgtgctggtctgtgtgccggcccatcactttggcaaagaattcacccaaccagtgcaggctgcctatcagaaagtggtggctggtgtggctaatgccctggcccacaagtatcactaagctcgctttcttgctgtccaatttctattaaaggttcctttgttccctaagtccaactactaaactgggggatattatgaagggccttgagcatctggattc

SEQ ID NO: 41 - DNA, 491 bp, Homo sapiens
cccacagactcagagagaacccaccatggtgctgtctcctgacgacaagaccaacgtcaaggccgcctggggtaaggtcggcgcgcacgctggcgagtatggtgcggaggccctggagaggatgttcctgtccttccccaccaccaagacctacttcccgcacttcgacctgagccacggctctgcccaggttaagggccacggcaagaaggtggccgacgcgctgaccaacgccgtggcgcacgtggacgacatgcccaacgcgctgtccgccctgagcgacctgcacgcgcacaagcttcgggtggacccggtcaacttcaagctcctaagccactgcctgctggtgaccctggccgcccacctccccgccgagttcacccctgcggtgcacgcctccctggacaagttcctggcttctgtgagcaccgtgctgacctccaaataccgttaagctggagcctcggtggccatgcttcttgcccctttgg

SEQ ID NO: 42 - DNA, 633 bp, Homo sapiens
actcttctggtccccacagactcagagagaacccaccatggtgctgtctcctgccgacaagaccaacgtcaaggccgcctggggtaaggtcggcgcgcacgctggcgagtatggtgcggaggccctggagaggatgttcctgtccttccccaccaccaagacctacttcccgcacttcgacctgagccacggctctgcccaggttaagggccacggcaagaaggtggccgacgcgctgaccaacgccgtggcgcacgtggacgacatgcccaacgcgctgtccgccctgagcgacctgcacgcgcacaagcttcgggtggacccggtcaacttcaagctcctaagccactgcctgctggtgaccctggccgcccacctccccgccgagttcacccctgcggtgcacgcctccctggacaagttcctggcttctgtgagcaccgtgctgacctccaaataccgttaagctggagcctcggtggccatgcttcttgccccttgggcctccccccagcccctcctccccttcctgcacccgtacccccgtggtctttgaataaagtctgagtgggcggcaaaaaaaaaaaaaaaaaaaaaaaaaacaaaaaaaaaaaaaaaaaaaaaaaaaaaaaa

SEQ ID NO: 43 - DNA, 782 bp, Homo sapiens
  modified_base (114)..(114): a, c, g, or t
  modified_base (712)..(712): a, c, g, or t
cttctgacctgcaggacagttttcctggagccatttggtatgaggtattaatttagcttaactaaattacaggggactcagaggccgtgctcctgaccgatccagacactattnctggctttttttttttttttttaacaatggtgtgcatgtgcaggaaatgacaaatttgtatgtcagattatacaaggatgtattcttaaaccgcatgactattcagatggctactgagttatcagtggccatttattagcatcatatttatttgtattttctcaacagatgttaaggtacaactgtgtttttctcgattatctaaaaaccatagtacttaaattgaacagttgcaaagatgtcttaattgtgtaaagaattggtgtagtcatgactttagctgatactcttatgtacgagatctgtctctgctgtttaacttcattggattaatcagctggtttcaactctactgcgaaacaaaaatagctccttaaaagtactgttctccttcagtggcatgtagttatctaatcaagacacctcattcaaacaaaacctgccttaggaaaatttaatatattttaaattattttaaaagaaatacaacatcttattctttagctttcttaatcggtgctttatggaggccagtgtaacgttacatgactcgttgagaaagttgaggaatttcctctaccacctttgttgcttgaangaaaaacatgtcttttcaaaatgagaggctttcattgaagaaaagaaaaaaacaacagttaaaagctaaa

SEQ ID NO: 44 - DNA, 756 bp, Homo sapiens
  modified_base (8)..(9): a, c, g, or t
  modified_base (11)..(11): a, c, g, or t
  modified_base (13)..(17): a, c, g, or t
  modified_base (326)..(326): a, c, g, or t
  modified_base (672)..(672): a, c, g, or t
  modified_base (678)..(678): a, c, g, or t
  modified_base (681)..(681): a, c, g, or t
  modified_base (685)..(685): a, c, g, or t
gcgccttnntntnnnnnttttttttttttttttttttaacttcctgcctatacacacgcagccatcagcccacaaagacatgactaccaacgcgggccccttgcacccatactggcctcagcacctaagactggacaactttgtacctaatgaccgccccacctggcatatactggctggcctcttctctgtcacaggggtcttagtcgtgaccacatggctgttgtcaggtcgtgctgcggttgtcccattggggacttggcggcgactgtccctgtgctggtttgcagtgtgtgggttcattcacctggtgatcgagggctggnttcgttctctactacgaagacctgcttggagaccaagccttcttatctcaactctggaaagagtatgccaagggagacagccgatacatcctgggtgacaacttcacagtgtgcatggaaaccatcacagcttgcctgtggggaccactcagcctgtgggtggtgatcgcctttctccgccagcatcccctccgcttcattctacagcttgtggtctctgtgggccagatctatggggatgtgctctacttcctgacagagcaccgcgacggattccagcacggagagctgggccaccctctctacttctggttttactttgtcttcatgaatgccctgtggctgntgctgnctngagnccttgtgcttgatgctgtgaagcacttactcatgcccaaacacgctgggatgccatggccccataagccaa

SEQ ID NO: 45 - DNA, 459 bp, Homo sapiens
  modified_base (12)..(13): a, c, g, or t
  modified_base (445)..(446): a, c, g, or t
  modified_base (448)..(453): a, c, g, or t
tttttttttttnntttttttttttttgtatgttggaacgtgccccagaatgaggcagttggcaaacttctcaggacaatgaatccttcccgtttttctttttatgccacacagtgcattgttttttctacctgcttgtcttatttttagaataatttagaaaaacaaaacaaaggctgtttttcctaattttggcatgaacccccccttgttccaaatgaagacggcatcacgaagcagctccaaaaggaaaagcttgggcggtgcccagcgtgcccgctgcccatcgacgtctgtcctggggacgtggagggtggcagcgtccccgcctgcaccagtgccgtcctgctgatgtggtaggctagcaatattttggttaaaatcatgtttgtgactgtaaccatttgtatgaattattttaaagaaataaaaatcctggaaagagnnannnnnnccagca

SEQ ID NO: 46 - DNA, 153 bp, Homo sapiens
  modified_base (2)..(5): a, c, g, or t
  modified_base (11)..(11): a, c, g, or t
  modified_base (137)..(138): a, c, g, or t
tnnnnggctgngagaagacgacagaaggggacagaggcaagaaaagatgttgatcaagaaagatgagaaccaggggtgagggctgaaggagaatcaaagataaaataccagtttaaaaaaaaaaaaaaaaaaaaaanngtcgtatcgaatcga

SEQ ID NO: 47 - DNA, 366 bp, Homo sapiens
  modified_base (19)..(19): a, c, g, or t
  modified_base (84)..(85): a, c, g, or t
  modified_base (89)..(89): a, c, g, or t
  modified_base (93)..(94): a, c, g, or t
  modified_base (96)..(101): a, c, g, or t
  modified_base (172)..(172): a, c, g, or t
  modified_base (191)..(191): a, c, g, or t
  modified_base (267)..(267): a, c, g, or t
  modified_base (278)..(278): a, c, g, or t
  modified_base (282)..(282): a, c, g, or t
  modified_base (285)..(285): a, c, g, or t
  modified_base (301)..(301): a, c, g, or t
  modified_base (328)..(328): a, c, g, or t
ttttttttttttttgccgnccactcagactttattcaaagaccaggaagggccggtgcaaggaggggaggagggcccgttgganngccnagcnngnnnnnngaacggctaccgaggctccagcttaacggtatttggaggtcagcacggtgctcacagaagccaggaacttntccagggaggcgtgcaccncaggggttgaactcggcggggaggtgggcggccagggtcaccagcaggcagtggcttaggagcttgaagttgaccngggtccacccnaagnttntgcgcgtgcaggtcgntcagggcggacagcgcgtttgggcatntcgtccacgtgcgccacggctttgggtcaagcgcgttc

SEQ ID NO: 48 - DNA, 556 bp, Homo sapiens
ttagtgatacttgtgggccagggcattagccacaccagccaccactttctgataggcagcctgcactggtggggtgaattctttgccaaagtgatgggccagcacacagaccagcacgttgcccaggagcctgaagttctcaggatccacgtgcagcttgtcacagtgcagctcactcagtgtggcaaaggtgcccttgaggttgtccaggtgagccaggccatcactaaaggcaccgagcactttcttgccatgagccttcaccttagggttgcccataacagcatcaggagtggacagatccccaaaggactcaaagaaccgagcactttcttgccatgagccttcaccttagggttgcccataacagcatcaggagtggacagatccccaaaggactcaaagaacctctgggtccaagggtagaccaccagcagcctgcccagggcctcaccaccaacttcatccacgttcaccttgccccacagggcagtaacggcagacttctcctcaggagtcaggtgcaccatggtgtctgtttgaggttgctagtgaa

SEQ ID NO: 49 - DNA, 534 bp, Homo sapiens
actcttctggtccccacagactcagagagaacccaccatggtgctgtctcctgccgacaagaccaacgtcaaggccgcctggggtaaggtcggcgcgcacgctggcgagtatggtgcggaggccctggagaggcacttcgacctgagccacggctctgcccaagttaagggccacggcaagaaggtggccgacgcgctgaccaacgccgtggcgcacgtggacgacatgcccaacgcgctgtccgccctgagcgacctgcacgcgcacaagcttcgggtggacccggtcaacttcaagctaagccactgcctgctggtgaccctggccgcccacctccccgccgagttcacccctgcggtgcacgcttccctggacaagttcctggcttctgtgagcaccgtgctgacctccaaataccgttaagctggagcctcggtagccgttcctcctgcccgctgggcctcccaacgggccctcctcccctccttgcaccggcccttcctggtctttgaataaagtctgagtgggcggca

SEQ ID NO: 50 - DNA, 713 bp, Homo sapiens
gaattcggcacgagccggagcgggcgtcatggcgcggctcctctggttgctccggggcctgaccctcggaactgcgcctcggcgggcggtgcggggccaagcgggcggcggcgggcccggcaccgggccgggactgggggaggcagggtctcttgcaacgtgtgagctgcctcttgccaagagtgagtggcaaaagaaactaaccccggagcagttctacgtcacaagagaaaagggaacggaaccgcctttcagtgggatctacctgaataacaaggaagcaggaatgtatcattgcgtgtgctgcgacagtccactcttcagttctgagaaaaagtactgctctggcactgggtggccttcgttttccgaggctcatggtacgtctggctctgatgaaagccacacagggatcctgagacgtctggatacctcgttaggatcagctcgcacagaggttgtctgcaagcagtgtgaagctcatctaggtcacgtgtttcctgatggacctgggcccaatggtcagaggttttgcatcaacagtgtggctttgaagttcaaaccaaggaaacactgaccatcttcaagagtcccgttcccttgccaccccttccacgtgcaccctcaatttcgcacaattcacttgaatgacttgttttatttgcaataaaactgggctgaatttgcaaaaaaaaaaaaaaaaaaaaaaaaaa

SEQ ID NO: 51 - DNA, 3405 bp, Homo sapiens
cgcccaacccaagttcaaaggctgataagagagaaaatctcatgaggaggttttagtctagggaaagtcattcagtggatgtgatcttggctcacaggggacgatgtcaagctcttcctggctccttctcagccttgttgctgtaactgctgctcagtccaccattgaggaacaggccaagacatttttggacaagtttaaccacgaagccgaagacctgttctatcaaagttcacttgcttcttggaattataacaccaatattactgaagagaatgtccaaaacatgaataatgctggggacaaatggtctgcctttttaaaggaacagtccacacttgcccaaatgtatccactacaagaaattcagaatctcacagtcaagcttcagctgcaggctcttcagcaaaatgggtcttcagtgctctcagaagacaagagcaaacggttgaacacaattctaaatacaatgagcaccatctacagtactggaaaagtttgtaacccagataatccacaagaatgcttattacttgaaccaggtttgaatgaaataatggcaaacagtttagactacaatgagaggctctgggcttgggaaagctggagatctgaggtcggcaagcagctgaggccattatatgaagagtatgtggtcttgaaaaatgagatggcaagagcaaatcattatgaggactatggggattattggagaggagactatgaagtaaatggggtagatggctatgactacagccgcggccagttgattgaagatgtggaacatacctttgaagagattaaaccattatatgaacatcttcatgcctatgtgagggcaaagttgatgaatgcctatccttcctatatcagtccaattggatgcctccctgctcatttgcttggtgatatgtggggtagattttggacaaatctgtactctttgacagttccctttggacagaaaccaaacatagatgttactgatgcaatggtggaccaggcctgggatgcacagagaatattcaaggaggccgagaagttctttgtatctgttggtcttcctaatatgactcaaggattctgggaaaattccatgctaacggacccaggaaatgttcagaaagcagtctgccatcccacagcttgggacctggggaagggcgacttcaggatccttatgtgcacaaaggtgacaatggacgacttcctgacagctcatcatgagatggggcatatccagtatgatatggcatatgctgcacaaccttttctgctaagaaatggagctaatgaaggattccatgaagctgttggggaaatcatgtcactttctgcagccacacctaagcatttaaaatccattggtcttctgtcacccgattttcaagaagacaatgaaacagaaataaacttcctgctcaaacaagcactcacgattgttgggactctgccatttacttacatgttagagaagtggaggtggatggtctttaaaggggaaattcccaaagaccagtggatgaaaaagtggtgggagatgaagcgagagatagttggggtggtggaacctgtgccccatgatgaaacatactgtgaccccgcatctctgttccatgtttctaatgattactcattcattcgatattacacaaggaccctttaccaattccagtttcaagaagcactttgtcaagcagctaaacatgaaggccctctgcacaaatgtgacatctcaaactctacagaagctggacagaaactgttcaatatgctgaggcttggaaaatcagaaccctggaccctagcattggaaaatgttgtaggagcaaagaacatgaatgtaaggccactgctcaactactttgagcccttatttacctggctgaaagaccagaacaagaattcttttgtgggatggagtaccgactggagtccatatgcagaccaaagcatcaaagtgaggataagcctaaaatcagctcttggagataaagcatatgaatggaacgacaatgaaatgtacctgttccgatcatctgttgcatatgctatgaggcagtactttttaaaagtaaaaaatcagatgattctttttggggaggaggatgtgcgagtggctaatttgaaaccaagaatctcctttaatttctttgtcactgcacctaaaaatgtgtctgatatcattcctagaactgaagttgaaaaggccatcaggatgtcccggagccgtatcaatgatgctttccgtctgaatgacaacagcctagagtttctggggatacagccaacacttggacctcctaaccagccccctgtttccatatggctgattgtttttggagttgtgatgggagtgatagtggttggcattgtcatcctgatcttcactgggatcagagatcggaagaagaaaaataaagcaagaagtggagaaaatccttatgcctccatcgatattagcaaaggagaaaataatccaggattccaaaacactgatgatgttcagacctccttttagaaaaatctatgtttttcctcttgaggtgattttgttgtatgtaaatgttaatttcatggtatagaaaatataagatgataaagatatcattaaatgtcaaaactatgactctgttcagaaaaaaaattgtccaaagacaacatggccaaggagagagcatcttcattgacattgctttcagtatttatttctgtctctggatttgacttctgttctgtttcttaataaggattttgtattagagtatattagggaaagtgtgtatttggtctcacaggctgttcagggataatctaaatgtaaatgtctgttgaatttctgaagttgaaaacaaggatatatcattggagcaagtgttggatcttgtatggaatatggatggatcacttgtaaggacagtgcctgggaactggtgtagctgcaaggattgagaatggcatgcattagctcactttcatttaatccattgtcaaggatgacatgctttcttcacagtaactcagttcaagtactatggtgatttgcctacagtgatgtttggaatcgatcatgctttcttcaaggtgacaggtctaaagagagaagaatccagggaacaggtagaggacattgctttttcacttccaaggtgcttgatcaacatctccctgacaacacaaaactagagccaggggcctccgtgaactcccagagcatgcctgatagaaactcatttctactgttctctaactgtggagtgaatggaaattccaactgtatgttcaccctctgaagtgggtacccagtctcttaaatcttttgtatttgctcacagtgtttgagcagtgctgagcacaaagcagacactcaataaatgctagatttacacactcaaaaaaaaaaaa

SEQ ID NO: 52 - DNA, 1244 bp, Homo sapiens
atggaagccccagctcagcttctcttcctcctgctactctggctcccagataccaccggagaaattgtgttgacacagtctccagccaccctgtctttgtctccaggggaaagagccaccctctcctgcagggccagtcagagtgttggcagctacttagcctggtaccaacagaaacctggccaggctcccaggcccctcatctatgatgcatccaacagggccactggcatcccagccaggttcagtggcagtgggtctgggacagacttcactctcaccatcagcagcctagagcctgaagattttgcagtttattactgtcaacaccgtgacaattggcctccgggggccactttcggcggagggaccaaggtggagatcaaacataccaccggagaaattgtgttgacacagtctccagccaccctgtctttgtctccaggggaaagagccaccctctcctgcagggccagtcagagtgttggcagctacttagcctggtaccaacagaaacctggccaggctcccaggcccctcatctatgatgcatccaacagggccactggcatcccagccaggttcagtggcagtgggtctgggacagacttcactctcaccatcagcagcctagagcctgaagattttgcagtttattactgtcaacaccgtgacaattggcctccgggggccactttcggcggagggaccaaggtggagatcaaacgaactgtggctgcaccatctgtcttcatcttcccgccatctgatgagcagttgaaatctggaactgcctctgttgtgtgcctgctgaataacttctatcccagagaggccaaagtacagtggaaggtggataacgccctccaatcgggtaactcccaggagagtgtcacagagcaggacagcaaggacagcacctacagcctcagcagcaccctgacgctgagcaaagcagactacgagaaacacaaagtctacgcctgcgaagtcacccatcagggcctgagctcgcccgtcacaaagagcttcaacaggggagagtgttagagggagaagtgcccccacctgctcctcagttccagcctgaccccctcccatcctttggcctctgaccctttttccacaggggacctacccctattgcggtcctccagctcatctttcacctcacccccctcctcctccttggctttaattatgctaatgttggaggagaatgaataaataaagtgaatctttgc

SEQ ID NO: 53 - DNA, 465 bp, Homo sapiens
  modified_base (5)..(5): a, c, g, or t
  modified_base (202)..(202): a, c, g, or t
ttttntatactaaccaggggtttaatataaatacaaccagcatagaaagacccaaaactatacagaaaccaaaaccagaatgccatgtggtggaggcaaagggcagaatttctgacccctttggctcagctgcccttccccacaaataaaaaccaacaaagaggacaaatcaggacaataaagaagattcatgctaagctgnggcagaggggggaaggtatgatcgggtgggggtgggacaaggaacggccatggaagatcactgggtcaggttggaccctgggctgggagcgggagggcaaggcccctcaccacaacttaacccaaacctaagctgcccccaggtgccataggtccctgtcccagcagggaggctgatgggcctgggcccatgcccctccccacctttgggggtcagaaaagtggccacccaggcctgctgggatggggcctgacacaggctct

SEQ ID NO: 54 - DNA, 1013 bp, Homo sapiens
atcattcctagaactgaagttgaaaaggccatcaggatgtcccggagccgtatcaatgatgctttccgtctgaatgacaacagcctagagtttctggggatacagccaacacttggacctcctaaccagccccctgtttccatatggctgattgtttttggagttgtgatgggagtgatagtggttggcattgtcatcctgatcttcactgggatcagagatcggaagaagaaaaataaagcaagaagtggagaaaatccttatgcctccatcgatattagcaaaggagaaaataatccaggattccaaaacactgatgatgttcagacctccttttagaaaaatctatgtttttcctcttgaggtgattttgttgtatgtaaatgttaatttcatggtatagaaaatataagatgataaagatatcattaaatgtcaaaactatgactctgttcagaaaaaaaattgtccaaagacaacatggccaaggagagagcatcttcattgacattgctttcagtatttatttctgtctctggatttgacttctgttctgtttcttaataaggattttgtattagagtatattagggaaagtgtgtatttggtctcacaggctgttcagggataatctaaatgtaaatgtctgttgaatttctgaagttgaaaacaaggatatatcattggagcaagtgttggatcttgtatggaatatggatggatcacttgtagaggacattgctttttcacttccaaggtgcttgatcaacatctccctgacaacacaaaactagagccaggggcctccgtgaactcccagagcatgcctgatagaaactcatttctactgttctctaactgtggagtgaatggaaattccaactgtatgttcaccctctgaagtgggtacccagtctcttaaatcttttgtatttgctcacagtgtttgagcagtgctgagcacaaagcagacactcaataaatgctagatttacacaaaaaaaaaaaaaaaa

SEQ ID NO: 55 - DNA, 2254 bp, Homo sapiens
  modified_base (268)..(269): a, c, g, or t
  modified_base (382)..(382): a, c, g, or t
  modified_base (873)..(873): a, c, g, or t
  modified_base (890)..(891): a, c, g, or t
  modified_base (1376)..(1376): a, c, g, or t
  modified_base (1383)..(1383): a, c, g, or t
  modified_base (1385)..(1386): a, c, g, or t
  modified_base (1388)..(1389): a, c, g, or t
  modified_base (1504)..(1504): a, c, g, or t
  modified_base (1766)..(1766): a, c, g, or t
  modified_base (1789)..(1789): a, c, g, or t
  modified_base (1794)..(1794): a, c, g, or t
  modified_base (1796)..(1796): a, c, g, or t
  modified_base (1798)..(1798): a, c, g, or t
  modified_base (1995)..(1995): a, c, g, or t
tttttttttataaaattaataaaaatattttattgaatttcaggaacttggtacttttttaaaacttcaaatctttgcacacaaatcaccactatactttctagaatagtggaagttaggacttcaagattgtcacttatctccttgtgtcacacagcacagaaaccccaagtcctcacactgcccccaccccccttctggccatgactaccaactactctgttattctagcggaggacaatgacggaagtgggtagacgactgaagnngatcagctgtccaccgcgtactctactaaagtgagaggaggagcaaccgaggatcatgccgcacacactctgagtgcaccacgtgacgtgggtcatacgggagttcccttttngttttctcgtttggttcagggcaaagctactgaaattgttcctagtccctgaggagctcagaagttgggcaaaggtcacagcagacttcctgaaaagcagacactgaggaacacagtggagagcgggagttcacagcgacgcagctgaggacgacgcaggacctctcccaaaggtgctgcagctccagcaccaggggccagggctgcggcgacagcagctcagcaacccttgctgtgctcaagttcttggggattcagagctaagttcaaaatttagaaacagtgccttaaagacgggcaagaaaacccggtgtgggagtctgctcatctatggtttgttactgctctcgcttcgatattcttaaattcctaggtaccaatgaaaaagccaagtgaacgtggcagagtgaggaggagacaggagcgtgtgcaccttccatctgtgagaggcacacttcagtctgggttcaagatgcagaatggtgcctacngcaaaaaaaaaaaaaannaccctcctcccttctttaccatttgaatggacattttccttacctgtgatcccaacagaaacagatccagacctatcatgtgaagtccacgttccaggatcagaagtaaccagtttatggactgagcttacacgggaaagtctacccccgactccttctggatagtaacatacacagctgcataaaaacgtctccaaggggacatacgatgcatttgcttggtgtcccagccaagctccccaccggcgacctcactgttccttagagctcgagagctcgtctcctatcaatcagagaaccccatcagctgtgaccaacagagctggagccctctgtggagggagctgaccccacacacaggacagagcagaatcctgattattttacaaactgcaaaccttctgagtaagaagacaaaaatatacattccaaggtatctgtaaagtgcttggaagatgcagacagctgcaccgaggggctctganccatccnanncnnctgcgctttgctgcggtcacacacacggtctcagtcacgtgatggttttgcttttatttcttaaacggctgagtgataatccagctagtgtgcagtcatttcatacctttcaatnggcgtcaccgcagtgacgctgccccagccccatgctgagggccgacacaattcacggaacagattcatcatatttggtctttatgtaaataataaatgttttaaaattgcctaaatataccattctgagccatttcatccctatttcatcccaccaggaaaatacaggttttttcctctctaaaaaaaaattaaataccaaaataactacatttaaataaataatgttatgatgatgacatttaaaagctcagccatcaggntgacgccctctccccatgtgcancggcncncngccctcggccggcacactcgggaagggccagcggttttcttcctgaggagccgggcgaggaggtgcagggacctcccactctcattccctcacccccgtcctgtcctcattttccgtagaggagtcagcctcaggattgggttcggttctgaaaggtcagggacatttcctaccacaaaacaggaaatgccccagangtgccctgcaggacgtggctcggaccctgctccaccatggcggccgctcaccgaaggtggggagtagacagcgggtcagaggcccggcctagagccggagggacaccccatatacaaacataccacggagagacctgggatctgagtttcaaaagggcctgtgataaaagactgaatcgttttccaaatgaagtagaaatggttctgtcgttttaacatacacaagacttaggagacttgttttactcagagtggaaaa

SEQ ID NO: 56 - DNA, 1973 bp, Homo sapiens
  modified_base (69)..(74): a, c, g, or t
  modified_base (326)..(326): a, c, g, or t
  modified_base (402)..(402): a, c, g, or t
  modified_base (411)..(411): a, c, g, or t
  modified_base (443)..(443): a, c, g, or t
  modified_base (470)..(470): a, c, g, or t
  modified_base (598)..(598): a, c, g, or t
  modified_base (600)..(600): a, c, g, or t
  modified_base (602)..(602): a, c, g, or t
  modified_base (605)..(605): a, c, g, or t
  modified_base (611)..(612): a, c, g, or t
  modified_base (620)..(623): a, c, g, or t
  modified_base (630)..(630): a, c, g, or t
  modified_base (634)..(635): a, c, g, or t
  modified_base (639)..(641): a, c, g, or t
  modified_base (644)..(644): a, c, g, or t
  modified_base (650)..(650): a, c, g, or t
  modified_base (654)..(654): a, c, g, or t
  modified_base (666)..(666): a, c, g, or t
  modified_base (675)..(675): a, c, g, or t
  modified_base (678)..(678): a, c, g, or t
  modified_base (681)..(681): a, c, g, or t
ttttttttttgtttttttttttttttttttttttttttttttttttttttttttttttttttttttttnnnnnntgcaaagattcactttatttattcattctcctccaacattagcataattaaagccaaggaggaggaggggggtgaggtgaaagatgagctggaggaccgcaataggggtaggtcccctgtggaaaaagggtcagaggccaaaggatgggagggggtcaggctggaactgaggagcaggtgggggcacttctccctctaacactctcccctgttgaagctctttgtgacgggcgagctcaggccctgatgggntgacttcgcaggcgtagactttgtgtttctcgtagtctgctttgctcagcgtcagggtgctgctgaggctgtaggntgctgtccnttgctgtcctgctctgtgacactctcctgggnagttacccgattggagggcgttatccnaccttccactgtactttggcctctctgggatagaagttattcagcaggcacacaacagaggcagttccagatttcaactgctcatcagatggcgggaagatgaagacagatggtgcagccacagttcntntnatntccacnntggtcccnnnnccgaaantganngggnnnatnatcatnctgntgacagtaatangttgcaaantcntcnggctgcaggctgctgatggtgaaactgaaatgtgtcccagacccacttccactgaaccttaatgggacccctgtttccaaattggatgcatcgtagatgaggagcttaggggctctcccaggtttttgttgataccaatttaaataattattaatggcctgactcgcctggcaggtgatggtgactctgtgtgctcagaataaatattaaataaaacaaagtttttttaaaaaggagtttgcattcagtggactgtcatgcttttggtaactttttttaattactgggataaaactgcacattaagacatattcctaaaaataccagcaaatgcagaaatatacaaattgtgcttaattagcgtacagagtaatgcaacaagtcaatgcaataaatagctcagaacacctaaaaacataaacatttaaaacaatttaatgtaatcaagacaaaatccaaaatttcaatgtattttttatagttaacaactgttttgccttttcagaggtctatgaaagtgacctttcttggaagtcatgaaattggatattttccctcatgcatagtcacccaaaaaaatctgcctggaatcaagagaaatcatgccagaaactcagttaacttaaaggtaatctgatatgtggccttgtctatttcttctaggctataatttctctggggaaagagtgtgacttttagtgtccttaccagggaaaacggtaagcgttttcttccctctagtgatacagcaagatgagtgaaagtggaagatgtcggaaggtgaataggcaagtaatgcttgcaatacattttgatgttcctacagaggtctaaaaacttttggtacctctgtacttctggctgtaacctctaagcttattccattataaacttcaggccccagcttcattctgaggtgattgcgccattgagatcactggtttgttttcttcaactcactcgaaactttactggtatttgttacttcactggtattcacgccagtttaaacattctcttctacagtcaaggtattgtttttaaaggactgttttgtacaaagatttccctgaggctaagtaacctttacatactaaattcttcaaagaaagaaaagaaaacttttccctaaatatgaactctgatgttctgaagttacggtgattttagatcattttttccgatcattatgacatcagagcaaccttatgcaggcttttctgtaaagactcaaagcatggactttagcaataaataatacttcacattgtacactgcaccatcatttaaaa

SEQ ID NO: 57 - DNA, 1304 bp, Homo sapiens
  modified_base (40)..(42): a, c, g, or t
  modified_base (866)..(866): a, c, g, or t
  modified_base (868)..(868): a, c, g, or t
  modified_base (870)..(872): a, c, g, or t
  modified_base (874)..(875): a, c, g, or t
  modified_base (877)..(878): a, c, g, or t
  modified_base (882)..(884): a, c, g, or t
  modified_base (1164)..(1165): a, c, g, or t
tttttttttttttttttttttttttttttttttttttttnnntaataaatatgagcatttatttggcacccgatggcaatacaaaatcctggcagtgggagtggaaaggttctctctctcaaatacttccatactatgtcgacccaaaggcaggacttggcagcaaggctcacaaaccacccaaacaaatatttattgagcaccttgactactacaggcctagcattttgctagggaccatgggagatgtgaaggaagttatctcacacatgatatgtcttcaaggagctaaaaatgccagtggataaaagcaaaacacatggaaaaacaaagtacaaataataatccgtgtatattgtcaaaaggaacattttatcaaaaggtaggattgtagctaaggttggcttgccttcttccctcttttattcaacaaacatttaatgaaggcccactatgtgccaagcacttggtacatgatggtgaataaaacaaacaaggtttctgccctcatttacagcctggtaggggagacagaaatgaacaagtaaaagtagcatatatataaactgcaataaatgcaatgaggggaaaagacaagatgtggtgacagacacagaagtagactgctcagggactgaagggcccgggaattgtcaagacttgaggaagaaggacaccacctgagtcaagagtggtgggggtggagagctgagaaggcccaggaaaagggcaggaaagagcacaaaattagaagctgagaggagaccactcgggctggagcttagcaagaaatcaccatttaatgaggttcaaggggaaggcaagaaccagttctcataaaccaaggtgaagagtttacattttanangnnngnnannagannncagaagggttctaagcaggggggtgatcagatttatatttaaacaaccaaatcctggccaggtgtggtggctcatgcctgtaagcccagctatttgagaggctgaggcgggaagatggcttgaggccaggagttcgagaccagtctgagaaacatagtgagaactcaccttaaaaaacaaaaaacagcaaacaaccaaaaaaaattaaaaaccaaaactactctgttatgtgagaacagactggaggaagaaagaatggaagtttttttttttttttttnnaaaaaaaggtcttgcccgggcgcagtggctcacgcctgtaatcccaacactttgggaggctgaggtgggtggatcatgaggtcaggagatcaagaccatcccggctaacatggtgaaaccctgtctctactaaaaatac

SEQ ID NO: 58 - DNA, 1017 bp, Homo sapiens
  modified_base (234)..(234): a, c, g, or t
  modified_base (238)..(238): a, c, g, or t
  modified_base (243)..(243): a, c, g, or t
  modified_base (301)..(301): a, c, g, or t
  modified_base (387)..(387): a, c, g, or t
  modified_base (406)..(408): a, c, g, or t
  modified_base (1001)..(1001): a, c, g, or t
cagggatgtacttcttatcacatttctatgaagaaatgggaagatcgggatatgaaaaagaaaatgttctatccccaaataaaagcagagcatggttaatgggacctgaatgcacatttatagcataaaagaatgtcaattctatttcataaaggaaaaatctcaactctttgtgactgagtttcacattaactggaactttatttgcttaaaacctaaacattgtcagtttgnaaanaaatnccactgtgacctgtagactgatcttgttgattaaattctagggttttttttttttttnggattcttggtaaaattttatccaaaaaacaggatacatatatatttagagaaggaaatatgaaatcaagagttttggcagccccntgctttttttttttttttnnnagctccctaaagactgtagcaggataaaaggatcactggctccgagtctctttgagataacaagtgatgaaataaaaaagaaagcccataccctcaaataaggtcaggtaaccccattgcccaccctccctacaaggtaaaaaatgagtacttttagtaacagttcagaattcatctttatctcctacctgcctcatcggtggaagtttaaagtcatgattttttttagacattgatacttgtgtctatagacaaataaactcatattagatgacaattgattttttaaaagtccaggtagagaaaggagcaatcattttgaactaaaatctttctatgttttttgattactattcaacttgctattttttagcaaaaagcgaagtttcaatagtgttcatctcaaatcttattgctttacaaccgtggtacacctttcattaaaaataaaaagatgaagcagtcaatccagtgattaatttgacatggctttcattgggaaaggggagggctggcaaagagaccaatagacaaaaaggtaacttaaacacttacacatacaatggtttgctttaaaaaaaaaaaaaaaaaangagagagagagagaaa

SEQ ID NO: 59 - DNA, 1528 bp, Homo sapiens
  modified_base (1490)..(1495): a, c, g, or t
  modified_base (1497)..(1498): a, c, g, or t
  modified_base (1500)..(1500): a, c, g, or t
tttggtggtggtggttttgttttgttttggagacggagtctcactcttgtcgcccaggctggagtgcaggcttggctcactgcaacctccacctcccgggttcaagcaattctcctgcctcagcctcctgagtagctgggattacaggcacccgccaccaccccccgctaattttttgtatttttatttttattttatttttttatttttttttgagacagagtgtcgctctgttgcccaggctggagtgtagtggtgcgatctcggctcactgcaagctccgcctcctgggttcgcgccattctcctgcctcagcctcctgagtagctggggctacaggtacccgccaccgcgcccagctaatttttttttttttgtatttttagtaaagacggggtttcacggtgttagccaggatggtctcaatctcctgacctcgtgatccgcccgccttggcctcccaaagtgctgggatcacaggcgtgagccaccgcgcccggcctattttttgtatttttagtagagactgggtttcatcatgttggtcgggctggtctccaactcctgacctcaggtgatccacctgccccgccccccaaagtgctagtgttacaagtgcgagccaccgtgtccggccgattctgaacagttttaataccattgctatttttgtgtttttcctgggcctttttttttttttttttttttttgagacagtctcgctctgttgcccaggctagagtgcaatggtgcaatctcagctcactgcaacctccaccccccacccccacaccccgttcaagtaattctcctgcctcagcctcccaaatagctgggattacaggtgtccgccaccacacccagctaatttttgttatttttagtagagatggggtttcactgtgttggtcaggctggtctccaactgttgccctcaggtgagccactgtgccccaccttttcctgggtttcataaggatctgaagtggtggattccttgtttttgctagtatctcatttagagttgagatggaccttaaaactcatctgttttaactcactttttaatagatgagttaaacttaatttacttaaggatgtacagttagagcctggaacttcaaccattattcactccccatgccctgtttccccccacttcgaaattaaatgcggttagcatcatatagttcattttccccctccatgctgctgtgtgattcttgactttgggtatgagtttttcatccttcatgcagggttctgtcagttcatggtatagtgattcagtgttaaaatggtggtgtctcagctgtgctgtgcacattccaaccttgtcaaattaatagtcctgagcaagcaagaaaaagaggtaataacatacccatttctttatgaatataagcttataatattttttcatgtgctatttttactgagcaaattgtatgtctcacatgttaacacaataaatatcttgacaattttannnnnnannanaaaaaaaaaaaaaaaaaaaaaaaaacaa

SEQ ID NO: 60 - DNA, 713 bp, Homo sapiens
  modified_base (27)..(30): a, c, g, or t
  modified_base (32)..(32): a, c, g, or t
  modified_base (34)..(37): a, c, g, or t
  modified_base (39)..(39): a, c, g, or t
  modified_base (148)..(148): a, c, g, or t
  modified_base (526)..(526): a, c, g, or t
  modified_base (532)..(532): a, c, g, or t
  modified_base (539)..(539): a, c, g, or t
  modified_base (542)..(542): a, c, g, or t
  modified_base (545)..(545): a, c, g, or t
  modified_base (557)..(557): a, c, g, or t
  modified_base (559)..(559): a, c, g, or t
  modified_base (596)..(596): a, c, g, or t
  modified_base (603)..(604): a, c, g, or t
  modified_base (616)..(616): a, c, g, or t
  modified_base (621)..(621): a, c, g, or t
  modified_base (629)..(629): a, c, g, or t
tggcacgaggctggaagaattcgcggnnnntntnnnntntttttttttttttttttctgctaccgtgactaagatggaagcgtttttggggtcgcggtccggactttgggcggggggtccggccccaggacagttttaccgcattccntccactcccgattccttcatggatccggcgtctgcactttacagaggtccaatcacgcggacccagaaccccatggtgaccgggacctcagtcctcggcgttaagttcgagggcggagtggtgattgccgcagacatgctgggatcctacggctccttggctcgtttccgcaacatctctcgcattatgcgagtcaacaacagtaccatgctgggtgcctctggcgactacgctgatttccagtatttgaagcaagttctcggccagatggtgattgatgaggagcttctgggagatggacacagctatagtcctagagctattcattcatggctgaccagggccatgtacagccggcgctcgaagatgaaccctttngtgganacaccanggncantcggaggctatncntgatggagagagcttcctcggttatgtggacatgctnggtgtannctatgaagcccnttcgntggccacnggttatggtgcatacttggtcagcctctgctgcgaaaagttcgggaaaagcagccagtgctaagccagaccgaggccggattag

SEQ ID NO: 61 - DNA, 809 bp, Homo sapiens
  modified_base (54)..(59): a, c, g, or t
  modified_base (468)..(468): a, c, g, or t
  modified_base (526)..(526): a, c, g, or t
  modified_base (537)..(537): a, c, g, or t
  modified_base (688)..(689): a, c, g, or t
  modified_base (691)..(693): a, c, g, or t
  modified_base (724)..(724): a, c, g, or t
  modified_base (730)..(730): a, c, g, or t
  modified_base (734)..(734): a, c, g, or t
  modified_base (741)..(741): a, c, g, or t
  modified_base (767)..(767): a, c, g, or t
  modified_base (770)..(770): a, c, g, or t
  modified_base (775)..(775): a, c, g, or t
  modified_base (780)..(780): a, c, g, or t
gcgttcggacccctgtcggatagtaaatcccaggtaaggtacctgcggtcggcnnnnnngctgcgttcggacccctgtcggatagtaaatcccagtaaggtacctgccgtgggcagatctgagctttcttcttggacaccccatacccacagtcctccaggccacccttaagtacaatgttctcctacctaagaaggcatctggattttctctttccttggaaatagtaaagaactactctttgactgtttttgacctcacagtgaacctcaaatacactggaattcgcaataaatccagtatggtggttatagatgtaaaaatgctatcaggatttactccaaccatgtcatccattgaagagcttgaaaacaagggccaagtgatgaagactgaagtcaagaatgaccatgttcttttctacttggaaaatgtttttggtcgagcagacagtttcactttttctgntgagcagagcaaccttgtgttcaacattcagccagccccaggcatggtctacgattantacgaaaaagntggagaagcatttcttttaacaaactgattcttctgtatcaaacctggaaaaaaatcatgaaccatctgacatcgtgaacagtctgcagtgggctatggtttcttgacaagtcttatttccttatcatcccattaaatgttgtcattttgnnannnaaaaaaaaaaaaaaaaaaaaaaaaaaaaaanaaaaanaaanaaaaaanaaaaaaaaaaaaaaaaaaaaaaacanaanaaaanaaaanaaaaaaaaaaaaaaaacaaaaaaaaaaaa

SEQ ID NO: 62 - DNA, 621 bp, Homo sapiens
  modified_base (439)..(439): a, c, g, or t
  modified_base (562)..(562): a, c, g, or t
gttttttttttttttttttttttttggttaccttctcattcatgtcaagtatgtggttcattcttagaaccaagggaaatactgctccccccatttgctgacgtagtgctctcatgggctcacctgggcccaaggcacagccagggcacagttaggcctggatgtttgcctggtccgtgagatgccgcgggtcctgtttccttactggggatttcagggctgggggttcagggagcatttccttttcctgggagttatgaccgcgaagttgtcatgtgccgtgcccttttctgtttctgtgtatcctattgctggtgactctgtgtgaactggcctttgggaaagatcagagagggcagaggtggcacaggacagtaaaggagatgctgtgctggccttcagcctggacagggtctctgctgactgccaggggcggggngctctgcatagccaggatgacggctttcatgtcccagagacctgttgtgctgtgtattttgatttcctgtgtatgcaaatgtgtgtatttaccattgtgtagggggctgtgtctgatcttggngttcaaaacagaactgtatttttgcctttaaaattaaataatataacgtgaataaatga

SEQ ID NO: 63 - DNA, 829 bp, Homo sapiens
  modified_base (62)..(64): a, c, g, or t
  modified_base (575)..(575): a, c, g, or t
  modified_base (638)..(638): a, c, g, or t
  modified_base (659)..(659): a, c, g, or t
  modified_base (693)..(693): a, c, g, or t
  modified_base (775)..(775): a, c, g, or t
  modified_base (823)..(823): a, c, g, or t
ttttttttttttttttttttttttttttggtgggggagttgaaacctaattttgtggcgtannngctatgcagcttgaaatccaagtagcactaaattttattatttcgtatttgtacaataagcttcccaggagacgtgtcaacatttttggtgaagaacttgaaagacttcttaagaagaaatatgaagggcactggtatcctgaaaagccatacaaaggatcggggtttagatgtatacacataggggagaaagtggacccagtgattgaacaagcatccaaagagagtggtttggacattgatgatgttcgtggcaatctgccacaggatcttagtgtttggatcgacccatttgaggtttcttaccaaattggtgaaaagggaccagtgaaggtgctttacgtggatgataataatgaaaatggatgtgagttggataaggagatcaaaaacagctttaacccagaggcccaggtttttatgcccataagtgacccagcctcatcagtgtccagctctccatcgcctccttttggtcactctgctgctgtaagccctaccttcatgcccnggtccactcagcctttaacctttaccactgccacttttgctgccaccaagttcggctctaccnaaatgaagaatagtggccgtnagcaacaaggttgcacgtacttctcccatcaacntcggcttgaatgtgaatgacctcttgaagcagaaagccatctcttcctcaatgcactctctgtatgggcttggcttgggtanccagcagcagccacagcaacagcagcagccagcccagccgccaccgcnaccacg

SEQ ID NO: 64 - DNA, 878 bp, Homo sapiens
  modified_base (26)..(26): a, c, g, or t
  modified_base (28)..(28): a, c, g, or t
  modified_base (39)..(39): a, c, g, or t
  modified_base (560)..(560): a, c, g, or t
  modified_base (565)..(565): a, c, g, or t
  modified_base (633)..(633): a, c, g, or t
tttcgagcggccgcccgggcaggtantnttttttttttntttttttttttttttgctgctccaacgaccagcatgtgttggagcagatctccatggtaagccaaaagtggacttgtcagcctataactactctgcagctgccactaactctacaggcacagtaactacactttatacaggagcacatgccaaagtgcctgggaggtgccaataaaatcaagaaataagaaaactacaaaaaaagatacggtattaaccttggacataattttttttagggaggcagctttcccacttttataaagggggttgtaaatctcaagaggtcatttgttccccatagcagcatatctcatttttaaattgaagcgaattaaataggattttactactcaacattcattatactgttaatctttgctgaaatatatgctaacaaatgttaagcaagggaaactgaagacttagtcatgtggattgttagcagtgatctgcattctgtaaaagaggtactttcccatgatgtaggcatgaagtggtgccagtaagcgtagagcggnaaatnttgactttagttaacattgggtttagcatttccagtgcagcattatcagtgggcctttaaaaatactncgtaagtacattagctttcactttgttgttaaattatagcagactcattatagagaacaagtttgccttgattttgtttaaaatgacttctgctaagcacccagaagataaaattgacatatttttataatataagcatactttttttgtacattgtgttcattcttgaataaaatgagttctgtgttggcttgtagatactaaaaagaaagtattgattttgattcaataaatgttttctttca

SEQ ID NO: 65 - DNA, 751 bp, Homo sapiens
  modified_base (3)..(6): a, c, g, or t
  modified_base (738)..(738): a, c, g, or t
cannnntaaatatgtttaaagaatattataattatatgacttagattgtaaaacaatatgtacagcagtgtcctattttttagaataaaattataaatatgtgctcacatatgtgtttgtgcatgcatagaaaacagattagaaaggaatatattctaacaccattatctctagctggtagaattatggaaaatttttatttccttctttttgcttctaaattttatataatgagcatatttggctttgtataatcatttttaaaaagttgttttagaagaatagtactgatatatcattcccttttagcagttttctctaggataaaaaataagaggaagtctgagcttaactaattaaaaaaacagatttctttaaaaaatattagcaaatcattagtgttcttactggagaaagggcagtgttcaaagaagaattaaacaaatcattccagttgcaggaaaaattcaatttactgcatgcagactgtttcttgactgaaaagttaattcctttcattcagaatcagtatgcatattcactggctatatttcatctcacatctgcaaacttaatttttcctttcttggtcatcagaagattaggaaataaattttagtccaggcaatagatcctacttggcaagctcaaaataactcaattattaaaaagcagcacacaaagaccagtagtgacttccaaaggattgttaacaatacttaaaaaaaaaaaaaaaanaaaaagaaaaaag

SEQ ID NO: 66 - DNA, 572 bp, Homo sapiens
tttttttttttttgcacttctgaggctagatatgtctggctgaagatttgatgtggttcctccttaagctatgcgtcctgttaataataggtactgtactgggctctgtgtaagtgtcgttggggtaggacctatattttaatactgttcctaacatttcattttactagcgagaaatctttgatttcattttattctttgtaattctagacactagattgtagtttagccataactgatgttttttaaaaagggatatattttcttgcacagttgttcaaaaaagagacaagtttcagtcctcaatgctgtcctttgttttacaggtacaagttttctagctcagacaaactatgaaaaactgtagactattctcaaggtattaactcgcagaccctctgggggtaggggctgttttctaagttacaggcagagtgggactgagatggtacagtgtgcacagacaggtactgagctgacagactgggattttctgtactaaaatgttactttgtatcaaaagttaaacaggctttagtacaacaaataaaggtcaatttctgtaaaaaaaa

SEQ ID NO: 67 - DNA, 793 bp, Homo sapiens
  modified_base (618)..(618): a, c, g, or t
  modified_base (632)..(632): a, c, g, or t
  modified_base (661)..(661): a, c, g, or t
  modified_base (678)..(678): a, c, g, or t
ttttaattttgaagctacctgaggtttagaattccttcagccctagctgcttttattctgctttttatttaaacaaaaagagggggaggatctgaaggaaactagttttctgtacaaaggctttgaggtccatggactatacttgtcccatttatcatcccaggtggtgctttgaccctgccataccctggctattaagataaaaagatttgtggacattaaaattatgaatatgtcagtaataatccagcacacattgaaatattgacacagattaccataatttgtgcaacatcttataaacaatgtcatttccatagtagtctaaggcttcaccagcctggcccactgtatctagactttaggttcattttaataattatgctttccttctctgtatcatttgggaagttgataaatatcacttccttagataccttcattcagtgatatatctggcttttacaattaaattggaaaaggtaagtttctctttggtgggttgagagttggaccatcaattctaatctacaaaaggaaattcatgatttcactctgacgcctaggatctagccaaggctggtctgcagtatcagatgtccaaactcatctactatnagccatattttgtnagtcgtttgtctaaactttgtcaaaaatncctttgccatgattttnttgctatctggatttcaaacatggacagttaggaagatgtgcattgaagtaggaaaattttgttcagatttgctgttatttattttttaaattaaaaatggaaatgtattttaaa

SEQ ID NO: 68 - DNA, 1150 bp, Homo sapiens
ctagtctcgagttttttttttttttttttctgtctctgtgtttgaagtttcagtttctgttttctaggtaaggcttatttttgattagcagtcaatggcaaagaaaaagtaaatcaaagatgacttcttttcaaaatgtattgtttagcacttaactcagatgaatttataaattattaatcttgatactaaggatttgttacttttttgcatattaggttaatttttaccttacatgtgagagtcttaccactaagccattctgtctctgtactgttgggaagttttggaaacccctgccagtgatctggtgatgatctgatgatttatttaaagagccgttgatgcctccaggaaacttaagtattttattaatatatatataggaatttttttttattttgctttgtctttctctcccttcttttatcctcatgttcattcttcaaaccagtgttttggaagtatgcatgcaggcctataaatgaaaaacacaattctttatgtgtatagcatgtgtattaatgtctaactacatacgcaaaaacttcctttacagaggttcggactaacatttcacatgcacatttcaaaacaagatgtgtcatgaaaacagcccctttacctgccaagacaagcagggctatatttcagtgacagctgatatttgttttgaaagtgaatctcataatatatatatgtattacacattattatgactagaagtatgtaagaaatgatcagaacaaaagaaaatttctattttcatgcaaatatttttcatcagtcatcactctcaaatataaattaaaatataacactcctgaatgcctgaggcacgatctggattttaaatgtgtggtattcattgaaaagaagctctccacccacttggtatttcaagaaaatttaaaacgatcccaaggaaagatgatgtgtatgttaaagtgactgcacaagtaaaagttcaatgttgtgtgcatgaaaaggattccttggttatgtgcagggaatcatctcacatgctgtttttcctatttggtttgagaaacaggctgacactattctctttgattagaaaataaactcataaaactcataatgttgatataatcaagatgtaaccactataaatatgtagaagaggaag

SEQ ID NO: 69 - DNA, 734 bp, Homo sapiens
  modified_base (93)..(93): a, c, g, or t
  modified_base (95)..(95): a, c, g, or t
  modified_base (554)..(554): a, c, g, or t
  modified_base (559)..(559): a, c, g, or t
  modified_base (646)..(646): a, c, g, or t
gatgtttaataccttctgaaacaggagggtaagatcagatgggaagcccctctgttgaaggatcttgggaaccttggtggttttttttttttngnttttttttttttgatcgagctgtggacatccttcttaattcgattctgaggatttgtttaactaaaaagttcccaaacacagaaagggcctccccacctgctttggggagctgtctgtgctgggagtgccaggcatcccatgggacccatcactgccagtgtctgtgcctcccagaggtcagccgtgtctgccctggctctgtctcctctgtgacagggcagagcatttctggtcagtttctccatggtgcctcccacccctttgtaaagtggatggacatgatggaattcagttgtctcaccctgatagcctgggtgttgatattcactttacccgcactcagacacaggcgaccttgaagcagttctcggtgtgtagagtccacgtgacagtccccacagcctccccagatagctgtgtgcctgtgcgctactgctgtgccattttcccaacttggncgttncactaaatgcagctgatctctctctctgtgcactcgtgatccatgttgaacaatacatgtaggttctttttccacgcaatgtaagancatgatatactgtacgttggaaagcatttaccttatttatatacctgaatgttcctactacacaaataaacatatattaaattctaaa

SEQ ID NO: 70 - DNA, 483 bp, Homo sapiens
  modified_base (427)..(427): a, c, g, or t
  modified_base (429)..(429): a, c, g, or t
  modified_base (431)..(434): a, c, g, or t
  modified_base (436)..(437): a, c, g, or t
  modified_base (439)..(441): a, c, g, or t
  modified_base (443)..(445): a, c, g, or t
  modified_base (448)..(449): a, c, g, or t
ttttttttttttaaagcctttatcggtatgaaaggttgaatgctctaggtttgagcactgctttctcggcttgctcttctggtgcagtataggcacacctagagggccacgtcagtctttgcgatcaccaaatctggttctgagaaataggcactggcaatttacacatgccttgctgtgtaatctcactatatttgctcaggcaaagtgggagaagcagccttaggttttcattctagagatgccggctttcccacctgatcggcttagagttcacgattgactgttttgggcttcatttcaccctctacataacaagcgggtggactagatgccttagcaagggtccgtgttgtgtggtgtctccagccacgcactcagctcaatcttagcacagttaaaaaatgcctttctagcaagttatctncncnnnncnngnnnannntcnnttcttgtgttcaataaaaagcctcctaatttaat

SEQ ID NO: 71 - DNA, 489 bp, Homo sapiens
cccccccccccctttttttttttttttttacattttaggacactgtgaggggaaaggacaattttgaaattccttttcaaggaaaaaaaaggtctttatgctttgccatgaggccacattcagctgctatttaaacttaatatcttgaacctaaagaatgctgacttttcctacatttccagagttaggcagtattctacacttaaagactactactatttttataaaaggtaatctattcaaatttcttcacagatttcaagtctctcaaacatcaagacaacttcagcagtcggtacaagtcacatttcattttgattgaatacatgatcttgaacagctcctgtacttgctctttgtaaaaaaaaataaaattattttgaattattctacctttgtaaacaattggctaaaagaatcatctttaagaaattaagccatttacatgtttgtgtttttctatagcagagcattatattttgcattata

SEQ ID NO: 72 - DNA, 548 bp, Homo sapiens
  modified_base (1)..(1): a, c, g, or t
  modified_base (146)..(146): a, c, g, or t
ntttttttacaaaaggaaaaaatattttgtttgaaaatctttgctacatgtcattatttttgccactgtaaagcttagcacagatgccagcaatacagaaatggccaacaagaaaacaaaacagtcaaaaataaaaccctgaaggnaaaagcaaaaacaaaacccccagagcatcttctcgctatcctccccttccccaaaagccctataataactgtacaatattatagtcctgatcacatttaaaaagtcgattattaaaaaacaagggttccattggaaactcaactttttggtttcgtaaattgtgatataaatatatatgtatactgtaagtgtgcacatagaataaaaaaataaactgtctccttttttactccactacctggcaccagactggagacataaggaagggaaactcagcaaatggacattcctttggcctcttcaaggccacccttgctcctcagtcccctatgactacatttaatatatcttctcattaattcagtcttgcactttagctactggccaaagccaatttaaaa

SEQ ID NO: 73 - DNA, 871 bp, Homo sapiens
  modified_base (33)..(33): a, c, g, or t
  modified_base (47)..(47): a, c, g, or t
  modified_base (49)..(49): a, c, g, or t
  modified_base (83)..(83): a, c, g, or t
  modified_base (124)..(124): a, c, g, or t
  modified_base (129)..(129): a, c, g, or t
  modified_base (856)..(857): a, c, g, or t
  modified_base (859)..(860): a, c, g, or t
ggcacgaggttttttttaattacatgtaattgnttatttaaaataantntccaagtcttccaatgatttaacaggctttgctncacttttatcatctcaaacagctataaatcaacacactttntgtantttattttactactatgtatgctattttaataacatttttctttattaatactagaaccaaatatattgaccaataagcagtatagatttaaattatcttcttgggttggtctgaggttgctgatggattcttgggattgatctgatgctagaagctatcttaggccctgtctctaactcactgtatgtttcaggcaaaacatgccacggttctaggtctgttttctcatctgcaaaataaacacccaaattagatgatacttattgttttaactagctataaaattccaatactatattccccatcattttcacttacttttacttaatctttatttgctacttttccacctataaagcgtaattttccatatcaagtaaacataaattcattaaaaaataaacacaaacccaaaatattcttattctaatatatctgcattaatagataaaaaggctttagctttaattttcatttttcatttctacctcttaaagtcaatgataaactcacaagtgtaaaatgaatgcatttaaaaacataaaagatacatttcaatgacaagaaatatgcaatgatcatgaaaatctactgtacactttgccacggtcaaagaatgaaggacaatatggaaaagccaatcttcaaatatatccttaacaaaaactctctcctgcatagtaaaagcatcatctaaacagcagctccaaccaaaaaaaaaaaaannanncgggggagagg

SEQ ID NO: 74 - DNA, 545 bp, Homo sapiens
  modified_base (106)..(106): a, c, g, or t
  modified_base (108)..(109): a, c, g, or t
  modified_base (134)..(134): a, c, g, or t
  modified_base (445)..(445): a, c, g, or t
  modified_base (504)..(517): a, c, g, or t
  modified_base (520)..(520): a, c, g, or t
  modified_base (522)..(523): a, c, g, or t
  modified_base (529)..(529): a, c, g, or t
cagtagagatggggcttcatcatgttggccaggtggtcctgaactcctgacctcaagtaatctgcctgccttggccttccaaaatgcttgggattacaggcgtgancnnctgcgcctggtccctattttctttntacaacagaccttgggaaatattttcttcccccaagaggttgaggcccatggaatgcattaggggcaggtggggtggtggtgctctgtagcctttaggacttctagaatcaggcttctgggccaccttcttagcaggtgtatacctctttgttccagactgactttctgtctcacaatatcttcactatttccacagttgcagccaagacaggaaactgaaagctgaggccagaagggtggtgtactggggggaggggaaaattgagtgtcactttggaaaactggggcccccatctaaggattgctgccnctgtagattcaaaagcaataaaacagcagctcattaactcttaaaaaaaaaaaaaaaannnnnnnnnnnnnngtntnnataaanatttttgctttgctgt

SEQ ID NO: 75 - DNA, 590 bp, Homo sapiens
  modified_base (181)..(181): a, c, g, or t
  modified_base (341)..(341): a, c, g, or t
  modified_base (385)..(385): a, c, g, or t
  modified_base (415)..(415): a, c, g, or t
  modified_base (419)..(419): a, c, g, or t
  modified_base (435)..(435): a, c, g, or t
  modified_base (447)..(447): a, c, g, or t
  modified_base (454)..(454): a, c, g, or t
  modified_base (457)..(457): a, c, g, or t
  modified_base (465)..(465): a, c, g, or t
  modified_base (470)..(470): a, c, g, or t
  modified_base (482)..(482): a, c, g, or t
  modified_base (489)..(489): a, c, g, or t
  modified_base (492)..(493): a, c, g, or t
  modified_base (498)..(498): a, c, g, or t
  modified_base (500)..(500): a, c, g, or t
  modified_base (514)..(519): a, c, g, or t
  modified_base (524)..(524): a, c, g, or t
  modified_base (527)..(528): a, c, g, or t
  modified_base (532)..(533): a, c, g, or t
tttttttttggtgacacgatgctgcattctaaaacttttatagttttagactatgtatgatgtgttgttgtaatctccatccaccataggatagagttaaaggcattctttgcaggcatattttgtatgccactgttttttgaaatgtgaaaaaaacgttggcatacttagttattttttnggacaagctacacttcaagcttgtttttaatgttaatttgatagtgtgtgtttttttttttaaacaaatcaagaagctgaaaaatttttaggattgttggtgcttagtagacttgataactattttaaaaatgcgtgaatttagtaaaattctttttttnctcactatgcatgtgtaaatgtttgtaacctggcttccctcttntccagtggtataaagaattgtgccgctttnaggnttgggttttttttttntccagtaaaaantttggtnccntatttgangtttncatttaaaatgngacattnttnngtggnanattcaaatattttnnnnnnctgtnttnntttnngggaaacccctttttatgaaagaaaatttttaggggttgtgctcaaaaatgggtttc

SEQ ID NO: 76 - DNA, 617 bp, Homo sapiens
  modified_base (15)..(15): a, c, g, or t
  modified_base (395)..(395): a, c, g, or t
  modified_base (534)..(534): a, c, g, or t
ttttttttttttttntggttctctgccctttattgcttcacaaattatcacaccaaagatctattatttatgcattacagtacatcagatatgcaggaactgattagatgaaaaactttgtacttttctttattcaaaagcaacaacattaagcattcaaaattatacagttttccctaaactttttaaaggtctactaggacagagaagaaactagtccacaatagctatggatggccattaatactatgatattaataaaaattactcacagtacacagacaacaaattaaatgtctatcagggtaagtttgcttaagtaaatgatgagacaaacataatttaaatctagtcattgacatcagaaaacaactattacatattaaatgggaganaaatggatcctatttatgtaaaattgtaagagaggtgctcagaaagatgttcaccagaaacttaacagtggttatcaatgagtagtgagatctggagtaatgtgttctttcttcctttgtacattgctatattatttgnctttttattaatatacaagtatcattttcacataggtagttttttttttttaataacccacctacagaaagacattcatgttc

SEQ ID NO: 77 - DNA, 1734 bp, Homo sapiens
  modified_base (24)..(25): a, c, g, or t
  modified_base (69)..(69): a, c, g, or t
  modified_base (76)..(76): a, c, g, or t
  modified_base (156)..(156): a, c, g, or t
  modified_base (159)..(159): a, c, g, or t
  modified_base (173)..(173): a, c, g, or t
  modified_base (218)..(218): a, c, g, or t
  modified_base (236)..(236): a, c, g, or t
  modified_base (243)..(243): a, c, g, or t
  modified_base (283)..(283): a, c, g, or t
  modified_base (323)..(324): a, c, g, or t
  modified_base (332)..(332): a, c, g, or t
  modified_base (379)..(379): a, c, g, or t
  modified_base (507)..(507): a, c, g, or t
  modified_base (547)..(547): a, c, g, or t
  modified_base (572)..(572): a, c, g, or t
  modified_base (576)..(576): a, c, g, or t
  modified_base (604)..(607): a, c, g, or t
  modified_base (609)..(609): a, c, g, or t
  modified_base (739)..(745): a, c, g, or t
  modified_base (755)..(755): a, c, g, or t
  modified_base (1449)..(1449): a, c, g, or t
  modified_base (1456)..(1457): a, c, g, or t
  modified_base (1469)..(1469): a, c, g, or t
  modified_base (1526)..(1526): a, c, g, or t
  modified_base (1536)..(1536): a, c, g, or t
  modified_base (1538)..(1538): a, c, g, or t
gccgcacctacaccagccaacccnngatcccgaggtccgacagcgcccggcccagatccccacgcctgnccaggangcaagccgagagccagccggccggcgcactccgactccgagcagtctctgtccttcgacccgagccccgcgccctttccnggnacccctgccccgcngggcagcgctgccaacctgccggccatggagaccccgtcccagcnggcgcgccacccgcagcnggggcgncaggccagctccactccgctgtcgcccacccgcatcaccncggctgcaggagaaggaggacctgcaggagctcaatgatnngcttggcnggtctacatcgaccgtgtgcgctcgctggaaacggagaacgcagggnctgcgccttcgcatcaccgagtctgaagaggtggtcagccgcgaggtgtccggcatcaaggccgcctacgaggccgagctcggggatgcccgcaagacccttgactcagtagccaaggagcgcgcccngcctgcagctggagctgagcaaagtgcgtgaggagtttanaggagctgaaagcgtgcaataccanaganggagggtgacctgatagctgctcaggcnnnngnctgaaggacctggaggctctgctgaactccaaggaggccgcactgagcactgctctcagtgagaagcgcacgctggagggcgagctgcatgatctgcggggccaggtggccaagcttgaggcagccctannnnnnnggccaagaangcaacttcaggatgagatgctgcggcgggtggatgctgagaacaggctgcagaccatgaaggaggaactggacttccagaagaacatctacagtgaggagctgcgtgagaccaagcgccgtcatgagacccgactggtggagattgacaatgggaagcagcgtgagtttgagagccggctggcggatgcgctgcaggaactgcgggcccagcatgaggaccaggtggagcagtataagaaggagctggagaagacttattctgccaagctggacaatgccaggcagtctgctgagaggaacagcaacctggtgggggccgcccacgaggagctgcagcagtcgcgcatccgcatcgacagcctctctgcccagctcagccagctccagaagcagctggcagccaaggaggcgaagcttcgagacctggaggactcactggcccgtgagcgggacaccagccggcggctgctggcggaaaaggagcgggagatggccgagatgcgggcaaggatgcagcagcagctggacgagtaccaggagcttctggacatcaagctggccctggacatggagatccacgcctaccgcaagctcttggagggcgaggaggagaggctacgcctgtcccccagccctacctcgcagcgcagccgtggccgtgcttcctctcactcatcccagacacagggtggngggcagnngtcaccaaaaangcgcaaactggagtccactgagagccgcagcagcttctcacagcacgcacgcactancgggcgcgtngnccgtggaggaggtggacgaggatgaggatggagatgacctgctccatcaccaccacgtgagtggtagccgccgctgaggccgagcctgcactggggccacccagccaggcctgggggcagcctctccccagcctccccgtgccaaaaatcttttcattaaagaatgttttggaactttaaaaaaaaaaaaaaaaaa

SEQ ID NO: 78 - DNA, 3999 bp, Homo sapiens
  modified_base (2855)..(2856): a, c, g, or t
  modified_base (2861)..(2861): a, c, g, or t
  modified_base (2863)..(2864): a, c, g, or t
  modified_base (2869)..(2869): a, c, g, or t
  modified_base (2872)..(2873): a, c, g, or t
  modified_base (2875)..(2876): a, c, g, or t
  modified_base (2879)..(2879): a, c, g, or t
  modified_base (2881)..(2881): a, c, g, or t
  modified_base (3024)..(3024): a, c, g, or t
  modified_base (3409)..(3409): a, c, g, or t
tttttttttttttttttttttttttgtagaagaaaacgattttttaataaatgcttaacccagttcaacatgaagactgggatttggaatgccttaaaagtctgaaggatgttgagttcaatgaggcagaagaagtggttccactgtaatttgtgattgtcgaggaagaggtgtggctgttggtgtgatagtaatactgctggtgactttattggttgttttgtttagtgccccgttaattaagccttgagttcggttatcctgcagtggtgctgaagggctggcaggtctcacagggctggctacagcttgcatgtaaggacttcctaagtgaatgtggattttattatcctcagtagttatcacacttgagctattgctgtttgaacgctgaaactgccatgatgactgccggtctggggagactctgaatatcgcatgcttggcactgatttctgttggttctggggagcgtccctgctcaggagagctagctgaaccagtcacagccaaaacctgaataggggacattgtcctttctggagttagagaaccacaagactctggggtctgtgctctggcaaaggttgccatggtaattggggacatgccttgttctaaattcatgaggtcttcggtagaggttttggactttactggtgttatggaggcgttttggaggatggttatcctttgctttggcgtgccacagttcggtatcactgcagtactcgtgtaagagtgaggactctctgtggttggacttgtgatttcaagagtggctgtgttttgtacatggtctggagtaacctttatatgaagtggctgcccaggtgtgtggcttaggactagatctccaggttgcacaaagttggcattgggtttagtttgcatttttccattctgaagatggccctccttggatttcatccagggaatccatagctttctgttaacaggacatggagtagactggctgcatttgaaggacagcacagatccctcatcattagggtcctcgtcttgattctcactctcctcatataactgaccattgatgactgcacgttccagaggaatgaggctcttgtaatcaggtggttcattgtctactgcttctgtctgaacttctttagaaaatacttgaggatcggaaattcttcttccattgagactaggcctgaggctcttactgaaatgccggtacctctctaactccttagtgaggttttcaatctctcttcctaaatctctgttcctgttttcttgttgatttagtttttttttgcaggactgagtgatctccctggaggtgacatattaggtcttcagttgccatgtattcatgaattttctcttttaatgcatccacttctcttgagaggtgccctgacttagcttcttcttcttgaagccttttgaaaagccattgttcatggctggtctctgtcttttctgctaacttgtacttagcaagttccattttaacatgttctagctctttagataaaaattgagctttgtctcgttcattagcataccttcgttctagagtctcatattcatcttctgttttcatgaggtcatcctcaatggctttcatgtcctttagcttcagtttcagtctttccacttcttgagagagctccttaatcttattgttttcttggtgtaatgctgttgtggatttcccagagtcttgatttaatttgttttttaggaaatctttctcaattgcttccaatgattgaagcctatttttcaacatattaactcttgacaggagatcatttcctttctcttcttccgctttcaatttgttttttaaatcatctctctccttggttacgctgtacatcttttcttctacatcggttttggacttgagcgcccttttagtttcctcaattaacttctcagtaactgttgttactttattttgctccacttgaagctgagaagaagcagcttgtaatttatcttcagttttctttaatttttcactcattgttttccgttcatctacaaacatcacagttaatgttttcagtttagttaaatcctcttttagagtgaattctgtcttttctagccgactttcaatggcttctagctctttgatccttacttttaaactctccagttcttgagacaactgctttgtggtcatcctttctttttctaaattgcatttcagagagtagcattcttgtttgcttttgttgaaagcgtcttctaacttttccagagccataattcttttactgagtttttcaacctctagtttaaagtctttactctgtaacgtctccctttcaagcctcttattgagatctctgcactgctcctccatttttatgagctcttcatctttcccttccatatctagcacacgtttcctgagctcttccacttcagccatgataccagcgtttccatattctcccttactgattttttcttttatatcttgcagctcctcttctgcttttcgtaaagacctgtttgtctcttctaactcatcaatctgccggctgagtgctgccagcttttgttgaagctggcgattttgactgtcctcattggtgagcttcgccataattgtgtcttggtcttggtgaaactttgtggtctgcgtttgcagttccttctctagtctggttgccttctgctcttcctcctgaactctggcttcagcaagggctagtttggtatgtgtttcctttgcatttgtggtcagctcttggattttctgtctttgaagggtgagctgtgccgtcagcctttgctgttcatccaccaccatcaaagcaaaagacttcagcttggtcagctcctctttcagggtggtgacnnttttntnnttttnttnntnnttntnctcctgagacttgatttcttgatcaattagcttctttaatctttcacattcctgttctagtaggcatatgaattcatcactcttctccatgtattctttatgttttctcttttcttcctccaactccaatatggtttgcctangggatttttctgccactaaaagctgtcccaggattcgtctgtaagattctttatgtttttccacaactttgtccaactcattcattggtttctcatagatgtcctcctgccaaggggtagatttcgcttgaaaagcatctctctggagagcctctaacaccttttttggagtgacaaacccatactgagcttccagcaaagccaggtccattttttcagcctttaaaatgcctatgacctcatctcgagcctgcagttctccctccagaatgctgaggagaaataacaggtcatctcttgagaggtcttctgcttggtggccattaccactgtgtggcttctctgccttgggacacggaagtattacatccgactcactgggggnagtctttgtcttgctgtctatgcttcatgtttttaggcccttggaaactgtggcctttagtatgtcttggaaatttcttttgggctgagccctcggtatcactgcctctggaacgcattctttaaagccgtgcaggtaccgtgcaggtgttgatcacacctggtaattccttcttctcatccccaccaaaatccaacagtggaatccaggaccaacaacaacgttttcttcttctctttttggacaccctctcagtttttgttttgtaggcttgaaagccaccgagagtttgcaaccaggggccagtgatagctctgcaaaggagaggcagtggggagcccaacaacaagtaggcccaaacactaaatattgccctcttccctctccgggcagtgtccttcatgctctgaagacaggcagccttaccaaaactcttaccccacagcttgccagtctctgtggaagaaaggttctaactggactgggctgcaggatgaggtgacccaaaagccaggaaccatctgcgcagagcagacaagtagaggcaggcacaggctccgtgagcacgtctgtgtgtgtgtgtgtgtgtg

SEQ ID NO: 79 - DNA, 774 bp, Homo sapiens
  modified_base (2)..(30): a, c, g, or t
  modified_base (208)..(208): a, c, g, or t
  modified_base (436)..(436): a, c, g, or t
  modified_base (631)..(631): a, c, g, or t
tnnnnnnnnnnnnnnnnnnnnnnnnnnnnntttttttttttttgctgataagaattcttttatgttattccaataaaaaatacattcatacagaaatataacaatcttgcaaaaaacaatttcaaataaaatcttgtaaaacaaaattttacaaaaatcttacaaagattctttagataacagggtgcttccaaaaaaaaaaaaaaangaaatttcactaatagaaatttttttttaatttcaagcaaaaagtttctgcttgattgaggctcagttatcacctgaacagaatgtacttctttatgtacgtgctaattatgaaaatcacaggcattgacaggtacggtacccagccccacccaggcaaacagctccgacatgtttcgtaagtgagacaagccagtgcaagtttttttttttcctttttttttttttngtcttttgcttaccttcttgcttaatggaattgttatggctaagcacatagaaggccaaaaaaggagttttccaaacccagcaaatcaagtgcttggattctgaactgccaaaagaaaactgcacttcccctcttaagtaaaacgaaatgagtttcttaggtaaatgtattcatcagcccagataaaaaaaaaanccagttatgtgagcgttagtcactgctcatttccaggaagatcaaacaaaataccagcccagccagactcacatgtgtgtatatatatataaagcaaagagccacacccacaagccagcagctgggtgaaatatcagctgtcc

SEQ ID NO: 80 - DNA, 338 bp, Homo sapiens
  modified_base (182)..(182): a, c, g, or t
  modified_base (185)..(186): a, c, g, or t
  modified_base (188)..(190): a, c, g, or t
  modified_base (192)..(192): a, c, g, or t
  modified_base (194)..(200): a, c, g, or t
  modified_base (202)..(203): a, c, g, or t
  modified_base (205)..(205): a, c, g, or t
  modified_base (207)..(207): a, c, g, or t
  modified_base (210)..(210): a, c, g, or t
  modified_base (276)..(276): a, c, g, or t
ggtaaggttgaatgcacttttggtttttggtcatgttcggttggtcaaagataaaaactaagtttgagagatgaatgcaaaggaaaaaaatattttccaaagtccatgtgaaattgtctcccattttttggcttttgagggggttcagtttgggttgcttgtctgtttccgggttggggggnaanntnnntngnnnnnnnanncngnttngtgctttgggaagttgtctctgaaacccggggacagaggacgcaggacagactaggagggagccgnggagattgggctgcagctgtggaggagggtttcagaggagagaggtccggagagcagaggcc

SEQ ID NO: 81 - DNA, 514 bp, Homo sapiens
  modified_base (32)..(32): a, c, g, or t
tttttttttttttttttttttttttttttttnttttttttttcttcttcttaatggccccagaagttgacagctttgcccgctcttggatcaccaagctccgatagtgttcgtcacatggatggtcccacatagactgcccgttggcgaagttgaaatagtaaatgtcacctgtgatgtcctggcatggtttccactctccaggcagtggggccacgatgccctctcgcgccagccacatcagttctggttccttgatgggatcaataccaatctcccgggcaaattcaagaatttcttgctcactaggaatgtaggtctcatcataatcttcttccagaaccagctgatctcctatgcggaggggtcgtccagccatgactcatctgggctcaaacacccgccagacccccagcccgggcccggtggcccgctcaggagccggcgagatttcaaacggaggaactgtcgcctggcagtccgattttcacttcttccctcagtcccctcgtgcc

SEQ ID NO: 82 - DNA, 1109 bp, Homo sapiens
ggcacgagggaggtggccccggatgctgcggcgcccgctggccgggctggctgcggccgccctgggccgggccccaccggacggcttgctctgctctttacctggggttgctgtcgaggaccctgtgcaagactcggccggtttttctttctccctgatggacagacccaaacatagccgcgcagcatcgtgaagggctggggccttcactcctctgtggctctggaagagcccgatttcctcaggaggcatgtcgggccccaggcctgtggtgctgagcgggccttcgggagctgggaagagcaccctgctgaagaggctgctccaggagcacagcggcatctttggcttcagcgtgtcccataccacgaggaacccgaggcccggcgaggagaacggcaaagattactactttgtaaccagggaggtgatgcagcgtgacatagcagccggcgacttcatcgagcatgccgagttctcggggaacctgtatggcacgagcaaggtggcggtgcaggccgtgcaggccatgaaccgcatctgtgtgctggacgtggacctgcagggtgtgcggaacatcaaggccaccgatctgcggcccatctacatctctgtgcagccgccttcactgcacgtgctggagcagcggctgcggcagcgcaacactgaaaccgaggagagcctggtgaagcggctggctgctgcccaggccgacatggagagcagcaaggagcccggcctgtttgatgtggtcatcattaacgacagcctggaccaggcctacgcagagctgaaggaggcgctctctgaggaaatcaagaaagctcaaaggaccggcgcctgaggcttgctgtctgttctcggcaccccgggcccatacaggaccagggcagcagcattgagccacccccttggcaggcgatacggcagctctgtgcccttggccagcatgtggagtggaggagatgctgcccctgtggttggaacatcctggggtgacccccgacccagcctcgctgggctgtcccctgtccctatctctcactctggacccagggctgacatcctaataaaataactgttggattagaaaaaaaaaaaaaaaaaaa

SEQ ID NO: 83 - DNA, 4153 bp, Homo sapiens
  modified_base (42)..(43): a, c, g, or t
  modified_base (46)..(49): a, c, g, or t
  modified_base (51)..(53): a, c, g, or t
  modified_base (63)..(64): a, c, g, or t
  modified_base (71)..(71): a, c, g, or t
  modified_base (88)..(88): a, c, g, or t
  modified_base (102)..(102): a, c, g, or t
  modified_base (106)..(106): a, c, g, or t
  modified_base (109)..(109): a, c, g, or t
  modified_base (153)..(153): a, c, g, or t
  modified_base (1542)..(1542): a, c, g, or t
  modified_base (3105)..(3105): a, c, g, or t
  modified_base (3121)..(3121): a, c, g, or t
  modified_base (3407)..(3407): a, c, g, or t
ccccggcccggccgggcagctggtaggtgccgtgcgcaaccnnccnnnngnnnccgccccttnnccctttnatgggaatacttttttnaaaaaaaaagagtntcgntgncgccaccccgtaggactggccgccctaaaaccgtgataaagganctgctcgccacttctcacttccgcttccttccagtaaggagtcggggtcttccccagttttctcagccaggcggcggcggcgactggcaatgtttggcctcaaaagaaacgcggtaatcggactcaacctctactgtgggggggccggcttgggggccggcagcggcggcgccacccgcccgggagggcgacttttggctacggagaaggaggcctcggcccggcgagagatagggggaggggaggccggcgcggtgattggcggaagcgccggcgcaagccccccgtccaccctcacgccagactcccggagggtcgcgcggccgccgcccattggcgccgaggtccccgacgtcaccgcgacccccgcgaggctgcttttcttcgcgcccacccgccgcgcggcgccgcttgaggagatggaagccccggccgctgacgccatcatgtcgcccgaagaggagctggacgggtacgagccggagcctctcgggaagcggccggctgtcctgccgctgctggagttggtcggggaatctggtaataacaccagtacggacgggtcactaccctcgacgccgccgccagcagaggaggaggaggacgagttgtaccggcagtcgctggagattatctctcggtaccttcgggagcaggccaccggcgccaaggacacaaagccaatgggcaggtctggggccaccagcaggaaggcgctggagaccttacgacgggttggggatggcgtgcagcgcaaccacgagacggccttccaaggcatgcttcggaaactggacatcaaaaacgaagacgatgtgaaatcgttgtctcgagtgatgatccatgttttcagcgacggcgtaacaaactggggcaggattgtgactctcatttcttttggtgcctttgtggctaaacacttgaagaccataaaccaagaaagctgcatcgaaccattagcagaaagtatcacagacgttctcgtaaggacaaaacgggactggctagttaaacaaagaggctgggatgggtttgtggagttcttccatgtagaggacctagaaggtggcatcaggaatgtgctgctggcttttgcaggtgttgctggagtaggagctggtttggcatatctaataagatagccttactgtaagtgcaatagttgacttttaaccaaccaccaccaccaccaaaaccagtttatgcagttggactccaagctgtaacttcctagagttgcaccctagcaacctagccagaaaagcaagtggcaagaggattatggctaacaagaataaatacatgggaagagtgctccccattgattgaagagtcactgtctgaaagaagcaaagttcagtttcagcaacaaacaaactttgtttgggnaagctatggaggaggacttttagatttagtgaagatggtagggtggaaagacttaatttccttgttgagaacaggaaagtggccagtagccaggcaagtcatagaattgattacccgccgaattcattaatttactgtagtagtgttaagagaagcactaagaatgccagtgacctgtgtaaaagttacaagtaatagaactatgactgtaagcctcagtactgtacaagggaagcttttcctctctctaattagctttcccagtatacttcttagaaagtccaagtgttcaggacttttatacctgttatactttggcttggtttccatgattcttactttattagcctagtttatcaccaataatacttgacggaaggctcagtaattagttatgaatatggatatcctcaattcttaagacagcttgtaaatgtatttgtaaaaattgtatatatttttacagaaagtctatttctttgaaacgaaggaagtatcgaatttacattagtttttttcatacccttttgaactttgcaacttccgtaattaggaacctgtttcttacagcttttctatgctaaactttgttctgttcagttctagagtgtatacagaacgaattgatgtgtaactgtatgcagactggttgtagtggaacaaatctgataactatgcaggtttaaattttcttatctgattttggtaagtattccttagataggtttttctttgaaaacctgggattgagaggttgatgaatggaaattctttcacttcattatatgcaagttttcaataattaggtctaagtggagttttaaggttactgatgacttacaaataatgggctctgattgggcaatactcatttgagttccttccatttgacctaatttaactggtgaaatttaaagtgaattcatgggctcatctttaaagcttttactaaaagattttcagctgaatggaactcattagctgtgtgcatataaaaagatcacatcaggtggatggagagacatttgatcccttgtttgcttaataaattataaaatgatggcttggaaaagcaggctagtctaaccatggtgctattattaggcttgcttgttacacacacaggtctaagcctagtatgtcaataaagcaaatacttactgttttgtttctattaatgattcccaaaccttgttgcaagtttttgcattggcatctttggatttcagtcttgatgtttgttctatcagacttaaccttttatttcctgtccttccttgaaattgctgattgttctgctccctctacagatatttatatcaattcctacagctttcccctgccatccctgaactctttctagcccttttagattttggcactgtgaaacccctgctggaaacctgagtgaccctccctccccaccaagagtccacagacctttcatctttcacgaacttgatcctgttagcaggtggtaataccatgggtgctgtgacactaacagtcattgagaggtgggaggaagtcccttttccttggactggtatcttttcaactatngttttatcctgtcttngggggcaatgtgtcaaaagtcccctcaggaattttcagaggaaagaacattttatgaggctttctctaaagtttcctttgtataggagtatgctcacttaaatttacagaaagaggtgagctgtgttaaacctcagagtttaaaagctactgataaactgaagaaagtgtctatattggaactagggtcatttgaaagcttcagtctcggaacatgacctttagtctgtggactccatttaaaaataggtatgaataagatgactaagaatgtaatggggaagaantgccctgcctgcccatctcagagccataaggtcatctttgctagagctatttttacctatgtatttatcgttcttgatcataagccgcttatttatatcatgtatctctaaggacctaaaagcactttatgtagtttttaattaatcttaagatctggttacggtaactaaaaaagcctgtctgccaaatccagtggaaacaagtgcatagatgtgaattggtttttaggggccccacttcccaattcattaggtatgactgtggaaatacagacaaggatcttagttgatattttgggcttggggcagtgagggcttaggacaccccaagtggtttgggaaaggaggaggggagtggtgggtttatagggggaggaggaggcaggtggtctaagtgctgactggctacgtagttcgggcaaatcctccaaaagggaaagggaggatttgcttagaaggatggcgctcccagtgactactttttgacttctgtttgtcttacgcttctctcagggaaaaacatgcagtcctctagtgtttcatgtacattctgtggggggtgaacaccttggttctggttaaacagctgtacttttgatagctgtgccaggaagggttaggaccaactacaaattaatgttggttgtcaaatgtagtgtgtttccctaactttctgtttttcctgagaaaaaaaaataaatcttttattcaaataaaaaaaaaaaaaaaaaaaaaaaaaaaaaaaa

SEQ ID NO: 84 - DNA, 2430 bp, Homo sapiens
gtcggggtcttccccagttttctcagccaggcggcggcggcgactggcaatgtttggcctcaaaagaaacgcggtaatcggactcaacctctactgtgggggggccggcttgggggccggcagcggcggcgccacccgcccgggagggcgacttttggctacggagaaggaggcctcggcccggcgagagatagggggaggggaggccggcgcggtgattggcggaagcgccggcgcaagccccccgtccaccctcacgccagactcccggagggtcgcgcggccgccgcccattggcgccgaggtccccgacgtcaccgcgacccccgcgaggctgcttttcttcgcgcccacccgccgcgcggcgccgcttgaggagatggaagccccggccgctgacgccatcatgtcgcccgaagaggagctggacgggtacgagccggagcctctcgggaagcggccggctgtcctgccgctgctggagttggtcggggaatctggtaataacaccagtacggacgggtcactaccctcgacgccgccgccagcagaggaggaggaggacgagttgtaccggcagtcgctggagattatctctcggtaccttcgggagcaggccaccggcgccaaggacacaaagccaatgggcaggtctggggccaccagcaggaaggcgctggagaccttacgacgggttggggatggcgtgcagcgcaaccacgagacggccttccaaggcatgcttcggaaactggacatcaaaaacgaagacgatgtgaaatcgttgtctcgagtgatgatccatgttttcagcgacggcgtaacaaactggggcaggattgtgactctcatttcttttggtgcctttgtggctaaacacttgaagaccataaaccaagaaagctgcatcgaaccattagcagaaagtatcacagacgttctcgtaaggacaaaacgggactggctagttaaacaaagaggctgggatgggtttgtggagttcttccatgtagaggacctagaaggtggcatcaggaatgtgctgctggcttttgcaggtgttgctggagtaggagctggtttggcatatctaataagatagccttactgtaagtgcaatagttgacttttaaccaaccaccaccaccaccaaaaccagtttatgcagttggactccaagctgtaacttcctagagttgcaccctagcaacctagccagaaaagcaagtggcaagaggattatggctaacaagaataaatacatgggaagagtgctccccattgattgaagagtcactgtctgaaagaagcaaagttcagtttcagcaacaaacaaactttgtttgggaagctatggaggaggacttttagatttagtgaagatggtagggtggaaagacttaatttccttgttgagaacaggaaagtggccagtagccaggcaagtcatagaattgattacccgccgaattcattaatttactgtagtagtgttaagagaagcactaagaatgccagtgacctgtgtaaaagttacaagtaatagaactatgactgtaagcctcagtactgtacaagggaagcttttcctctctctaattagctttcccagtatacttcttagaaagtccaagtgttcaggacttttatacctgttatactttggcttggttccatgattcttactttattagcctagtttatcaccaataatacttgacggaaggctcagtaattagttatgaatatggatatcctcaattcttaagacagcttgtaaatgtatttgtaaaaattgtatatatttttacagaaagtctatttccttgaaacgaaggaagtatcgaatttacattagtttttttcatacccttttgaactttgcaacttccgtaattaggaacctgtttcttacagcttttctatgctaaactttgttctgttcagttctagagtgtatacagaacgaattgatgtgtaactgtatgcagactggttgtagtggaacaaatctgataactatgcaggtttaaattttcttatctgattttggtaagtattccttagataggttttctttgaaaacctgggattgagaggttgatgaatggaaattctttcacttcattatatgcaagttttcaataattaggtctaagtggagttttaaggttactgatgacttacaaataatgggctctgattgggcaatactcatttgagttccttccatttgacctaatttaactggtgaaatttaaagtgaattcatgggctcatctttaaagcttttactaaaagattttcagctgaatggaactcattagctgtgtgcatataaaaagatcacatcaggtggatggagagacatttgatcccttgtttgcttaataaattataaaatgatggcttggaaaaaaaaaaaaaaaa

SEQ ID NO: 85 - DNA, 2387 bp, Homo sapiens
gctgctgcgacagtccactacctttttcgagagtgactcccgttgtcccaaggcttcccagagcgaacctgtgcggctgcaggcaccggcgcgtcgagtttccggcgtccggaaggaccgagctcttctcgcggatccagtgttccgtttccagcccccaatctcagagccgagccgacagagagcagggaaccggcatggccaaagccgcggcgatcggcatcgacctgggcaccacctactcctgcgtgggggtgttccaacacggcaaggtggagatcatcgccaacgaccagggcaaccgcaccacccccagctacgtggccttcacggacaccgagcggctcatcggggatgcggccaagaaccaggtggcgctgaacccgcagaacaccgtgtttgacgcgaagcggctgatcggccgcaagttcggcgacccggtggtgcagtcggacatgaagcactggcctttccaggtgatcaacgacggagacaagcccaaggtgcaggtgagctacaagggggacaccaaggcattctaccccgaggagatctcgtccatggtgctgaccaagatgaaggagatcgccgaggcgtacctgggctacccggtgaccaacgcggtgatcaccgtgccggcctacttcaacgactcgcagcgccaggccaccaaggatgcgggtgtgatcgcggggctcaacgtgctgcggatcatcaacgagcccacggccgccgccatcgcctacggcctggacagaacgggcaagggggagcgcaacgtgctcatctttgacctgggcgggggcaccttcgacgtgtccatcctgacgatcgacgacggcatcttcgaggtgaaggccacggccggggacacccacctgggtggggaggactttgacaacaggctggtgaaccacttcgtggaggagttcaagagaaaacacaagaaggacatcagccagaacaagcgagccgtgaggcggctgcgcaccgcctgcgagagggccaagaggaccctgtcgtccagcacccaggccagcctggagatcgactccctgtttgagggcatcgacttctacacgtccatcaccagggcgaggttcgaggagctgtgctccgacctgttccgaagcaccctggagcccgtggagaaggctctgcgcgacgccaagctggacaaggcccagattcacgacctggtcctggtcgggggctccacccgcatccccaaggtgcagaagctgctgcaggacttcttcaacgggcgcgacctgaacaagagcatcaaccccgacgaggctgtggcctacggggcggcggtgcaggcggccatcctgatgggggacaagtccgagaacgtgcaggacctgctgctgctggacgtggctcccctgtcgctggggctggagacggccggaggcgtgatgactgccctgatcaagcgcaactccaccatccccaccaagcagacgcagatcttcaccacctactccgacaaccaacccggggtgctgatccaggtgtacgagggcgagagggccatgacgaaagacaacaatctgttggggcgcttcgagctgagcggcatccctccggcccccaggggcgtgccccagatcgaggtgaccttcgacatcgatgccaacggcatcctgaacgtcacggccacggacaagagcaccggcaaggccaacaagatcaccatcaccaacgacaagggccgcctgagcaaggaggagatcgagcgcatggtgcaggaggcggagaagtacaaagcggaggacgaggtgcagcgcgagagggtgtcagccaagaacgccctggagtcctacgccttcaacatgaagagcgccgtggaggatgaggggctcaagggcaagatcagcgaggccgacaagaagaaggtgctggacaagtgtcaagaggtcatctcgtggctggacgccaacaccttggccgagaaggacgagtttgagcacaagaggaaggagctggagcaggtgtgtaaccccatcatcagcggactgtaccagggtgccggtggtcccgggcctgggggcttcggggctcagggtcccaagggagggtctgggtcaggccccaccattgaggaggtagattaggggcctttccaagattgctgtttttgttttggagcttcaagactttgcatttcctagtatttctgtttgtcagttctcaatttcctgtgtttgcaatgttgaaattttttggtgaagtactgaacttgctttttttccggtttctacatgcagagatgaatttatactgccatcttacgactatttcttctttttaatacacttaactcaggccattttttaagttggttacttcaaagtaaataaactttaaaattcaagtga

SEQ ID NO: 86 - DNA, 3757 bp, Homo sapiens
gcttgccacatgtactatgtggagagatgtaccaccctgcatcagcttttaccctacagaaggaaatcagcgttccattatattttattgttatcaacagtttaggaatacatagctttgcttttgcctttttctttccttccccttgtttcccctcgcctcagagaaaagaaggaaaaaaaaattcatctttcctacccccctctttttggatgataggacttgaagacaatctgaaataccacataaactcacttccagatgttttttgtttcatatgcaattgaattgggctcagactgtgtttttaagctgtatggtaaaaatatcactgtcttctagggccttattggggggcagggagagacgtgacactttgtcagaagggattgagtctgctaacttaaactctccttgattcaggaatacaaagtctccagctgtgaacagagactcatcagtgaaatagagtacaggctagaaaggtctcctatggatgaatcatggtgatgaacgttcacgtacggcagacgctgcctcgtggaaaactggaatggcaccattctttgagatgaagctgaaacattacaagatctttgagggaatgccagtaactttcacatgtagagttgctggaaatccaaagccaaagatctattggtttaaagatgggaagcagatctctccaaagagtgatcactacaccattcaaagagatctcgatgggacctgctccctccataccacagcctccaccctagatgatgatgggaattatacaattatggctgcaaaccctcagggccgcatcagttgtactggacggctaatggtacaggctgtcaaccaaagaggtcgaagtccccggtctccctcaggccatcctcatgtcagaaggcctcgttctagatcaagggacagtggagacgaaaatgaaccaattcaggagcgattcttcagacctcacttcttgcaggctcctggagatctgactgttcaagaaggaaaactctgcagaatggactgcaaagtcagtgggttaccaaccccagatctaagctggcaactagatggaaagcccgtacgccctgacagtgctcacaagatgctggtgcgtgagaacggggtgcactctctgatcatagagccagtcacgtcacgtgatgccggcatctacacatgtatagctaccaaccgagcaggacagaactcattcagcctggagcttgtggttgctgctaaagaagcacacaaaccccctgtgtttattgagaagctccaaaacacaggagttgctgatgggtacccagtgcggctggaatgtcgtgtattgggagtgccaccacctcagatattttggaagaaagaaaatgaatcactcactcacagcactgaccgagtgagcatgcaccaggacaaccacggctacatctgcctgctcattcagggagccacaaaagaagatgctgggtggtatactgtgtcagccaagaatgaagcagggattgtgtcctgtactgccaggctggacgtttacacccagtggcatcagcagtcacagagcaccaagccaaaaaaagtacggccctcagccagtcgctatgcagcactttcggaccagggactagacatcaaagcagcgttccaacctgaggccaacccatctcacctgacactgaatactgccttggtagaaagtgaggacctgtaatccagcattcttgttaaagctgaaacactgaaacagccattgccttgaccaacatattcctttgtcacattatgtaaaaggcagaaacatacctttgactataagaaattaaaaaaaaacaccaaaataatatttttcttacttgatataccaaacttagtttaagtagataatgctaatacaaatatacacattgcacagaaaatacacatttactgtccaatttaaaactttggaattgctgtgattaaagtgatcaaaatgccaaaatactaaaggaaatcaattgttcacaggtaactacaatttgtattatctacaagtgcctttaaacacaagatataggtgctgtgtagcctgatagtgtgaaatgtttaatgagggagttgtaccacaaacagtactacaatgattctgaagcacagtgtattcagacagatacagtgaaccaagtgcaatatgtaaggatgaaagaagaagagatgacaaagaaatccaagtaaatgccttgtctttgcaaatgtttttatattaaatcataaggaaggaactacttgccttaaatgttaatatcaaaagagttttctaacaaggttaataccttagttcttaacattttttttctttatgtgtagtgttttcatgctaccttggtaggaaacttatttacaaaccatattaaaaggctaatttaaatataaataatataaagtgctctgaataaagcagaaatatattacagttcattccacagaaagcatccaaaccacccaaatgaccaaggcatatatagtatttggaggaatcaggggtttggaaggagtagggaggagaatgaaggaaaatgcaaccagcatgattatagtgtgttcatttagataaaagtagaaggcacaggagaggtagcaaaggccaggcttttctttggttttcttcaaacataggtgaaaaaaacactgccattcacaagtcaaggaacccagggccagctggaagtgtggagcacacatgctgtggagcacacatgctgtggagattgcagtgtgtctgaggtttgtgtagtagtggaagattttaggtatgtagagcaagttgaaaatggattgagactgcatggtggcataaatgagaaattgcctgtagcatctagtctacttgaaggaagtggagacataaggagagacaaaaacaggtttgtgccataaagtattttttcaaagacaccaagatgtggtaaatgaaaattattagttcacttccctgctgccatgaaactttgccttaagaaggtgctggattccaaggtttgtaaaggcatctcggtaaagactgctttttgaatgcatatgattttgcatcagctagactgagttgattctgaccagacttgatggttttaagtcggaaccgataaattttaaaaaggagaaaaaataatttgacctagtagtataaaacatgaggctttaatggtactttgctatgaaaagaaaacactgtattccttatgcaaaacacatgtatctttcattatttataagtggcctctcttagctcagttactcaattcatacgtagtattttttaaaataattttatatctgtgtaccaccccatatatttcatattactgtttcacatgtacagctttctacttctttgtaagaacaccaaccaaccaaggtttaagtgattaataggcttgagcaccgggtggcagatgttctatgcagtgtggttcaagtttctttgaccgcacttatatgcattgctaatatggaatttaagataccatacacagtctctcatggacctatctctattgtagaattatgacttatgtcttacttggcaaatttttctgaatgtgacctttttttgctgatttgctgggtttgggattaactagcattattttgccacctttatattgtatttataaaaaaaaagtactatcaatcaatcatactactttggattgttgtgctggtgtaatgtggatttaacatcaataaatatttgacaaataaaaaaaaaaaaaaaaaa

SEQ ID NO: 87 - DNA, 3903 bp, Homo sapiens
  modified_base (6)..(6): a, c, g, or t
  modified_base (9)..(9): a, c, g, or t
  modified_base (17)..(21): a, c, g, or t
  modified_base (23)..(25): a, c, g, or t
  modified_base (27)..(27): a, c, g, or t
  modified_base (31)..(31): a, c, g, or t
  modified_base (36)..(37): a, c, g, or t
  modified_base (40)..(47): a, c, g, or t
  modified_base (49)..(52): a, c, g, or t
  modified_base (55)..(55): a, c, g, or t
  modified_base (146)..(146): a, c, g, or t
  modified_base (235)..(235): a, c, g, or t
  modified_base (507)..(507): a, c, g, or t
  modified_base (1978)..(1978): a, c, g, or t
  modified_base (3169)..(3169): a, c, g, or t
  modified_base (3268)..(3268): a, c, g, or t
  modified_base (3275)..(3275): a, c, g, or t
  modified_base (3308)..(3308): a, c, g, or t
tatttnttntttttttnnnnntnnntntttnttttnnttnnnnnnnntnnnnttnttatttgtcaaatatttattgatgttaaatccacattacaccagcacaacaatccaaagtagtatgattgattgatagtactttttttttnataaatacaatataaaggtggcaaaataatgctagttaatcccaaacccagcaaatcagcaaaaaaaggtcacattcagaaaaatttgncaagtaagacataagtcataattctacaatagagataggtccatgagagactgtgtatggtatcttaaattccatattagcaatgcatataagtgcggtcaaagaaacttgaaccacactgcatagaacatctgccacccggtgctcaagcctattaatcacttaaaccttggttggttggtgttcttacaaagaagtagaaagctgtacatgtgaaacagtaatatgaaatatatggggtggtacacagatataaaattattttaaaaaantactacgtatgaattgagtaactgagctaagagaggccacttataaataatgaaagatacatgtgttttgcataaggaatacagtgttttcttttcatagcaaagtaccattaaagcctcatgttttatactactaggtcaaattattttttctcctttttaaaatttatcggttccgacttaaaaccatcaagtctggtcagaatcaactcagtctagctgatgcaaaatcatatgcattcaaaaagcagtctttaccgagatgcctttacaaaccttggaatccagcaccttcttaaggcaaagtttcatggcagcagggaagtgaactaataattttcatttaccacatcttggtgtctttgaaaaaatactttatggcacaaacctgtttttgtctctccttatgtctccacttccttcaagtagactagatgctacaggcaatttctcatttatgccaccatgcagtctcaatccattttcaacttgctctacatacctaaaatcttccactactacacaaacctcagacacactgcaatctccacagcatgtgtgctccacagcatgtgtgctccacacttccagctggccctgggttccttgacttgtgaatggcagtgtttttttcacctatgtttgaagaaaaccaaagaaaagcctggcctttgctacctctcctgtgccttctacttttatctaaatgaacacactataatcatgctggttgcattttccttcattctcctccctactccttccaaacccctgattcctccaaatactatatatgccttggtcatttgggtggtttggatgctttctgtggaatgaactgtaatatatttctgctttattcagagcactttatattatttatatttaaattagccttttaatatggtttgtaaataagtttcctaccaaggtagcatgaaaacactacacataaagaaaaaaaatgttaagaactaaggtattaaccttgttagaaaactcttttgatattaacatttaaggcaagtagttccttccttatgatttaatataaaaacatttgcaaagacaaggcatttacttggatttctttgtcatctcttcttctttcatccttacatattgcacttggttcactgtatctgtctgaatacactgtgcttcagaatcattgtagtactgtttgtggtacaactccctcattaaacatttcacactatcaggctacacagcacctatatcttgtgtttaaaggcacttgtagataatacaaattgtagttacctgtgaacaattgatttcctttagtattttggcattttgatcactttaatcacagcaattccaaagttttaaattggacagtaaatgtgtattttctgtgcaatgtgtatatttgtattagcattatctacttaaactaagtttggtatatcaagtaagaaaaatattattttggtgtttttttttnaatttcttatagtcaaaggtatgtttctgccttttacataatgtgacaaaggaatatgttggtcaaggcaatggctgtttcagtgtttcagctttaacaagaatgctggattacaggtcctcactttctaccaaggcagtattcagtgtcaggtgagatgggttggcctcaggttggaacgctgctttgatgtctagtccctggtccgaaagtgctgcatagcgactggctgagggccgtactttttttggcttggtgctctgtgactgctgatgccactgggtgtaaacgtccagcctggcagtacaggacacaatccctgcttcattcttggctgacacagtataccacccagcatcttcttttgtggctccctgaatgagcaggcagatgtagccgtggttgtcctggtgcatgctcactcggtcagtgctgtgagtgagtgattcattttctttcttccaaaatatctgaggtggtggcactcccaatacacgacattccagccgcactgggtacccatcagcaactcctgtgttttggagcttctcaataaacacagggggtttgtgtgcttctttagcagcaaccacaagctccaggctgaatgagttctgtcctgctcggttggtagctatacatgtgtagatgccggcatcacgtgacgtgactggctctatgatcagagagtgcaccccgttctcacgcaccagcatcttgtgagcactgtcagggcgtacgggctttccatctagttgccagcttagatctggggttggtaacccactgactttgcagtccattctgcagagttttccttcttgaacagtcagatctccaggagcctgcaagaagtgaggtctgaagaatcgctcctgaattggttcattttcgtctccactgtcccttgatctagaacgaggccttctgacatgaggatggcctgagggagaccggggacttcgacctctttggttgacagcctgtaccattagccgtccagtacaactgatgcggccctgagggtttgcagccataattgtataattcccatcatcatctagggtggaggctgtggtatggagggagcaggtcccatcgagatctctttgaatggtgtagtgatcactctttggagagatctgcttcccatctttaaaccaatagatctttggctttggatttccagcnactctacatgtgaaagttactggcattccctcaaagatcttgtaatgtttcagcttcatctcaaagaatggtgccattccagttttccacgaggcagcntctgccntacgtgaacgttcatcaccatgagttcatccanaggagacctttctagcctgtactctatttcactgatgagtctctgttcacagctggagactttgtattcctgaatcaaggagagtttaagttagcagactcaatcccttctgacaaagtgtcacgtctctccctgccccccaataaggccctagaagacagtgatatttttaccatacagcttaaaaacacagtctgagcccaattcaattgcatatgaaacaaaaaacatctggaagtgagtttatgtggtatttcagattgtcttcaagtcctatcatccaaaaagaggggggtaggaaagatgaatttttttttccttcttttctctgaggcgaggggaaacaaggggaaggaaagaaaaaggcaaaagcaaagctatgtattcctaaactgttgataacaataaaatataatggaacgctgatttccttctgtagggtaaaagctgatgcagggtggtacatctctccacatagtacatgtggcaagcagctgccatattatatacaattatagtaaaagaataatagaaaaaatggtactagaaaaaatggtaatagaaaaaatagtaaaagaataataggaaaaaaaaa

SEQ ID NO: 88 - DNA, 655 bp, Homo sapiens
tgctcggtcagtcagtcggcggccggcgcccggcttgtgctcagacctcgcgcttgcggcgcccaggcccagcggccgtagctagcgtctggcctgagaacctcggcgctccggcggcgcgggcaccacgagcggagcttcgcagcggctccagaggaggcaggcgagtgagcgagtccgaggggtggccggggcaggtggtggcgccgcgaagatggtcgccaagcaaaggatccgtatggccaacgagaagcacagcaagaacatcacccagcgcggcaacgtcgccaagacctcgagaaatgcccccgaagagaaggcgtctgtaggaccctggttattggctctcttcatttttgttgtctgtggttctgcaattttccagattattcaaagtatcaggatgggcatgtgaagtgactgaccttaagatgtttccattctcctgtgaatttttaacttgaactcattcctgatgtttgataccctggttgaaaacaattcagtaaagcatcctgcctcagaatgactttcctatcatgcttcatgtgtcattccaaggtttcttcatgagtcattccaagttttctagtccataccacagtgccttgcaaaaaacaccacatgaataaagcaataaaatttgattgttaag

SEQ ID NO: 89 - DNA, 1330 bp, Homo sapiens
gcagcccagccaagcactgtcaggaatcctgtgaagcagctccagctatgtgtgaagaagaggacagcactgccttggtgtgtgacaatggctctgggctctgtaaggccggctttgctggggacgatgctcccagggctgttttcccatccattgtgggacgtcccagacatcagggggtgatggtgggaatgggacaaaaagacagctacgtgggtgacgaagcacagagcaaaagaggaatcctgaccctgaagtacccgatagaacatggcatcatcaccaactgggacgacatggaaaagatctggcaccactctttctacaatgagcttcgtgttgcccctgaagagcatcccaccctgctcacggaggcacccctgaaccccaaggccaaccgggagaaaatgactcaaattatgtttgagactttcaatgtcccagccatgtatgtggctatccaggcggtgctgtctctctatgcctctggacgcacaactggcatcgtgctggactctggagatggtgtcacccacaatgtccccatctatgagggctatgccttgccccatgccatcatgcgtctggatctggctggccgagatctcactgactacctcatgaagatcctgactgagcgtggctattccttcgttactactgctgagcgtgagattgtccgggacatcaaggagaaactgtgttatgtagctctggactttgaaaatgagatggccactgccgcatcctcatcctcccttgagaagagttacgagttgcctgatgggcaagtgatcaccatcggaaatgaacgtttccgctgcccagagaccctgttccagccatccttcatcgggatggagtctgctggcatccatgaaaccacctacaacagcatcatgaagtgtgatattgacatcaggaaggacctctatgctaacaatgtcctatcagggggcaccactatgtaccctggcattgccgaccgaatgcagaaggagatcacggccctagcacccagcaccatgaagatcaagatcattgcccctccggagcgcaaatactctgtctggatcggtggctccatcctggcctctctgtccaccttccagcagatgtggatcagcaaacaggaatacgatgaagccgggccttccattgtccaccgcaaatgcttctaaaacactttcctgctcctctctgtctctagcacacaactgtgaatgtcctgtggaattatgccttcagttcttttccaaatcattcctagccaaagctctgactcgttacctatgtgttttttaataaatctgaaataggctactggtaa

SEQ ID NO: 90 - DNA, 1173 bp, Homo sapiens
aggccaagatggcggcagctgcggcttcgcttcgcggggtagtgttgggcccgcggggcgcggggctcccgggcgcgcgtgcccggggtctgctgtgcagcgcgcggcccgggcagctcccgctacggacacctcaggcagtggccttgtcgtcgaagtctggcctttcccgaggccggaaagtgatgctgtcagcgctgggcatgctggcggcagggggtgcggggctggccgtggctctgcattcggctgtgagtgccagtgacctggaggtgcacccccccagctatccgtggtctcaccgtggcctcctctcttccttggaccacaccagcatccggaggggtttccaggtatataagcaggtgtgcgcctcctgccacagcatggacttcgtggcctaccgccacctggtgggcgtgtgctacacggaggatgaagctaaggagctggctgcggaggtggaggttcaagacggccccaatgaagatggggagatgttcatgcggccagggaagctgttcgactatttcccaaaaccataccccaacagtgaggctgctcgagctgccaacaacggagcattgccccctgacctcagctacatcgtgcgagctaggcatggtggtgaggactacgtcttctccctgctcacgggctactgcgagccacccaccggggtgtcactgcgggaaggtctctacttcaacccctactttcctggccaggccattgccatggcccctcccatctacacagatgtcttagagtttgacgatggcaccccagctaccatgtcccagatagccaaggatgtgtgcaccttcctgcgctgggcatctgagccagagcacgaccatcgaaaacgcatggggctcaagatgttgatgatgatggctctgctggtgcccctggtctacaccataaagcggcacaagtggtcagtcctgaagagtcggaagctggcatatcggccgcccaagtgaccctgtccagtgtctgcttgccatcctgccagaacaggccctcaagcccaagagccatcccaggcctgttcaggctcagctaagcctctcttcatctggaagaagaggcaagggggcaggagaccaggctctagctctgggccctccttcagcccccatcatgggaataaattaattttctcaatgt

SEQ ID NO: 91 - DNA, 2036 bp, Homo sapiens
ccggccctcgccctgtccgccgccaccgccgccgccgccagagtcgccatgcagatcccgcgcgccgctcttctcccgctgctgctgctgctgctggcggcgcccgcctcggcgcagctgtcccgggccggccgctcggcgcctttggccgccgggtgcccagaccgctgcgagccggcgcgctgcccgccgcagccggagcactgcgagggcggccgggcccgggacgcgtgcggctgctgcgaggtgtgcggcgcgcccgagggcgccgcgtgcggcctgcaggagggcccgtgcggcgaggggctgcagtgcgtggtgcccttcggggtgccagcctcggccacggtgcggcggcgcgcgcaggccggcctctgtgtgtgcgccagcagcgagccggtgtgcggcagcgacgccaacacctacgccaacctgtgccagctgcgcgccgccagccgccgctccgagaggctgcaccggccgccggtcatcgtcctgcagcgcggagcctgcggccaagggcaggaagatcccaacagtttgcgccataaatataactttatcgcggacgtggtggagaagatcgcccctgccgtggttcatatcgaattgtttcgcaagcttccgttttctaaacgagaggtgccggtggctagtgggtctgggtttattgtgtcggaagatggactgatcgtgacaaatgcccacgtggtgaccaacaagcaccgggtcaaagttgagctgaagaacggtgccacttacgaagccaaaatcaaggatgtggatgagaaagcagacatcgcactcatcaaaattgaccaccagggcaagctgcctgtcctgctgcttggccgctcctcagagctgcggccgggagagttcgtggtcgccatcggaagcccgttttcccttcaaaacacagtcaccaccgggatcgtgagcaccacccagcgaggcggcaaagagctggggctccgcaactcagacatggactacatccagaccgacgccatcatcaactatggaaactcgggaggcccgttagtaaacctggacggtgaagtgattggaattaacactttgaaagtgacagctggaatctcctttgcaatcccatctgataagattaaaaagttcctcacggagtcccatgaccgacaggccaaaggaaaagccatcaccaagaagaagtatattggtatccgaatgatgtcactcacgtccagcaaagccaaagagctgaaggaccggcaccgggacttcccagacgtgatctcaggagcgtatataattgaagtaattcctgataccccagcagaagctggtggtctcaaggaaaacgacgtcataatcagcatcaatggacagtccgtggtctccgccaatgatgtcagcgacgtcattaaaagggaaagcaccctgaacatggtggtccgcaggggtaatgaagatatcatgatcacagtgattcccgaagaaattgacccataggcagaggcatgagctggacttcatgtttccctcaaagactctcccgtggatgacggatgaggactctgggctgctggaataggacactcaagacttttgactgccattttgtttgttcagtggagactccctggccaacagaatccttcttgatagtttgcaggcaaaacaaatgtaatgttgcagatccgcaggcagaagctctgcccttctgtatcctatgtatgcagtgtgctttttcttgccagcttgggccattcttgcttagacagtcagcatttgtctcctcctttaactgagtcatcatcttagtccaactaatgcagtcgatacaatgcgtagatagaagaagccccacgggagccaggatgggactggtcgtgtttgtgcttttctccaagtcagcacccaaaggtcaatgcacagagaccccgggtgggtgagcgctggcttctcaaacggccgaagttgcctcttttaggaatctctttggaattgggagcacgatgactctgagtttgagctattaaagtacttcttacaaa

SEQ ID NO: 92 - DNA, 1887 bp, Homo sapiens
gcgcacggcctgtccgctgcacaccagcttgttggcgtcttcgtcgccgcgctcgccccgggctactcctgcgcgccacaatgagctcccgcatcgccagggcgctcgccttagtcgtcacccttctccacttgaccaggctggcgctctccacctgccccgctgcctgccactgccccctggaggcgcccaagtgcgcgccgggagtcgggctggtccgggacggctgcggctgctgtaaggtctgcgccaagcagctcaacgaggactgcagcaaaacgcagccctgcgaccacaccaaggggctggaatgcaacttcggcgccagctccaccgctctgaaggggatctgcagagctcagtcagagggcagaccctgtgaatataactccagaatctaccaaaacggggaaagtttccagcccaactgtaaacatcagtgcacatgtattgatggcgccgtgggctgcattcctctgtgtccccaagaactatctctccccaacttgggctgtcccaaccctcggctggtcaaagttaccgggcagtgctgcgaggagtgggtctgtgacgaggatagtatcaaggaccccatggaggaccaggacggcctccttggtaaggagctgggattcgatgcctccgaggtggagttgacgagaaacaatgaattgattgcagttggaaaaggcagctcactgaagcggatccctgtttttggaatggagcctcgcatccgatacaaccctttacaaggccagaaatgtattgttcaaacaacttcatggtcccagtgctcaaagacctgtggaactggtatctccacacgagttaccaatgacaaccctgagtgccgccttgtgaaagaaacccggatttgtgaggtgcggccttgtggacagccagtgtacagcagcctgaaaaagggcaagaaatgcagcaagaccaagaaatcccccgaaccagtcaggtttacttacgctggatgtttgagtgtgaagaaataccggcccaagtactgcggttcctgcgtggacggccgatgctgcacgccccagctgaccaggactgtgaagatgcggttccgctgcgaagatggggagacattttccaagaacgtcatgatgatccagtcctgcaaatgcaactacaactgcccgcatgccaatgaagcagcgtttcccttctacaggctgttcaatgacattcacaaatttagggactaaatgctacctgggtttccagggcacacctagacaaacaagggagaagagtgtcagaatcagaatcatggagaaaatgggcgggggtggtgtgggtgatgggactcattgtagaaaggaagccttgctcattcttgaggagcattaaggtatttcgaaactgccaagggtgctggtgcggatggacactaatgcagccacgattggagaatactttgcttcatagtattggagcacatgttactgcttcattttggagcttgtggagttgatgactttctgttttctgtttgtaaattatttgctaagcatattttctctaggcttttttccttttggggttctacagtcgtaaaagagataataagattagttggacagtttaaagcttttattcgtcctttgacaaaagtaaatgggagggcattccatcccttcctgaagggggacactccatgagtgtctgtgagaggcagctatctgcactctaaactgcaaacagaaatcaggtgttttaagactgaatgttttatttatcaaaatgtagcttttggggagggaggggaaatgtaatactggaataatttgtaaatgattttaattttatattcagtgaaaagattttatttatggaattaaccatttaataaagaaatatttacct

SEQ ID NO: 93 - DNA, 5843 bp, Homo sapiens
  modified_base (72)..(75): a, c, g, or t
  modified_base (78)..(89): a, c, g, or t
  modified_base (4902)..(4902): a, c, g, or t
  modified_base (4919)..(4919): a, c, g, or t
  modified_base (4930)..(4930): a, c, g, or t
  modified_base (4946)..(4946): a, c, g, or t
  modified_base (5723)..(5733): a, c, g, or t
  modified_base (5735)..(5737): a, c, g, or t
  modified_base (5740)..(5742): a, c, g, or t
ctaaccgacgcgcgtctgtggagaagcggcttggtcgggggtggtctcgtggggtcctgcctgtttagtcgnnnncannnnnnnnnnnncccttcacgaccgtcaccatggaagtgtcaccattgcagcctgtaaatgaaaatatgcaagtcaacaaaataaagaaaaatgaagatgctaagaaaagactgtctgttgaaagaatctatcaaaagaaaacacaattggaacatattttgctccgcccagacacctacattggttctgtggaattagtgacccagcaaatgtgggtttacgatgaagatgttggcattaactatagggaagtcacttttgttcctggtttgtacaaaatctttgatgagattctagttaatgctgcggacaacaaacaaagggacccaaaaatgtcttgtattagagtcacaattgatccggaaaacaatttaattagtatatggaataatggaaaaggtattcctgttgttgaacacaaagttgaaaagatgtatgtcccagctctcatatttggacagctcctaacttctagtaactatgatgatgatgaaaagaaagtgacaggtggtcgaaatggctatggagccaaattgtgtaacatattcagtaccaaatttactgtggaaacagccagtagagaatacaagaaaatgttcaaacagacatggatggataatatgggaagagctggtgagatggaactcaagcccttcaatggagaagattatacatgtatcacctttcagcctgatttgtctaagtttaaaatgcaaagcctggacaaagatattgttgcactaatggtcagaagagcatatgatattgctggatccaccaaagatgtcaaagtctttcttaatggaaataaactgccagtaaaaggatttcgtagttatgtggacatgtatttgaaggacaagttggatgaaactggtaactccttgaaagtaatacatgaacaagtaaaccacaggtgggaagtgtgtttaactatgagtgaaaaaggctttcagcaaattagctttgtcaacagcattgctacatccaagggtggcagacatgttgattatgtagctgatcagattgtgactaaacttgttgatgttgtgaagaagaagaacaagggtggtgttgcagtaaaagcacatcaggtgaaaaatcacatgtggatttttgtaaatgccttaattgaaaacccaacctttgactctcagacaaaagaaaacatgactttacaacccaagagctttggatcaacatgccaattgagtgaaaaatttatcaaagctgccattggctgtggtattgtagaaagcatactaaactgggtgaagtttaaggcccaagtccagttaaacaagaagtgttcagctgtaaaacataatagaatcaagggaattcccaaactcgatgatgccaatgatgcagggggccgaaactccactgagtgtacgcttatcctgactgagggagattcagccaaaactttggctgtttcaggccttggtgtggttgggagagacaaatatggggttttccctcttagaggaaaaatactcaatgttcgagaagcttctcataagcagatcatggaaaatgctgagattaacaatatcatcaagattgtgggtcttcagtacaagaaaaactatgaagatgaagattcattgaagacgcttcgttatgggaagataatgattatgacagatcaggaccaagatggttcccacatcaaaggcttgctgattaattttatccatcacaactggccctctcttctgcgacatcgttttctggaggaatttatcactcccattgtaaaggtatctaaaaacaagcaagaaatggcattttacagccttcctgaatttgaagagtggaagagttctactccaaatcataaaaaatggaaagtcaaatattacaaaggtttgggcaccagcacatcaaaggaagctaaagaatactttgcagatatgaaaagacatcgtatccagttcaaatattctggtcctgaagatgatgctgctatcagcctggcctttagcaaaaaacagatagatgatcgaaaggaatggttaactaatttcatggaggatagaagacaacgaaagttacttgggcttcctgaggattacttgtatggacaaactaccacatatctgacatataatgacttcatcaacaaggaacttatcttgttctcaaattctgataacgagagatctatcccttctatggtggatggtttgaaaccaggtcagagaaaggttttgtttacttgcttcaaacggaatgacaagcgagaagtaaaggttgcccaattagctggatcagtggctgaaatgtcttcttatcatcatggtgagatgtcactaatgatgaccattatcaatttggctcagaattttgtgggtagcaataatctaaacctcttgcagcccattggtcagtttggtaccaggctacatggtggcaaggattctgctagtccacgatacatctttacaatgctcagctctttggctcgattgttatttccaccaaaagatgatcacacgttgaagtttttatatgatgacaaccagcgtgttgagcctgaatggtacattcctattattcccatggtgctgataaatggtgctgaaggaatcggtactgggtggtcctgcaaaatccccaactttgatgtgcgtgaaattgtaaataacatcaggcgtttgatggatggagaagaacctttgccaatgcttccaagttacaagaacttcaagggtactattgaagaactggctccaaatcaatatgtgattagtggtgaagtagctattcttaattctacaaccattgaaatctcagagcttcccgtcagaacatggacccagacatacaaagaacaagttctagaacccatgttgaatggcaccgagaagacacctcctctcataacagactatagggaataccatacagataccactgtgaaatttgttgtgaagatgactgaagaaaaactggcagaggcagagagagttggactacacaaagtcttcaaactccaaactagtctcacatgcaactctatggtgctttttgaccacgtaggctgtttaaagaaatatgacacggtgttggatattctaagagacttttttgaactcagacttaaatattatggattaagaaaagaatggctcctaggaatgcttggtgctgaatctgctaaactgaataatcaggctcgctttatcttagagaaaatagatggcaaaataatcattgaaaataagcctaagaaagaattaattaaagttctgattcagaggggatatgattcggatcctgtgaaggcctggaaagaagcccagcaaaaggttccagatgaagaagaaaatgaagagagtgacaacgaaaaggaaactgaaaagagtgactccgtaacagattctggaccaaccttcaactatcttcttgatatgcccctttggtatttaaccaaggaaaagaaagatgaactctgcaggctaagaaatgaaaaagaacaagagctggacacattaaaaagaaagagtccatcagatttgtggaaagaagacttggctacatttattgaagaattggaggctgttgaagccaaggaaaaacaagatgaacaagtcggacttcctgggaaaggggggaaggccaaggggaaaaaaacacaaatggctgaagttttgccttctccgcgtggtcaaagagtcattccacgaataaccatagaaatgaaagcagaggcagaaaagaaaaataaaaagaaaattaagaatgaaaatactgaaggaagccctcaagaagatggtgtggaactagaaggcctaaaacaaagattagaaaagaaacagaaaagagaaccaggtacaaagacaaagaaacaaactacattggcatttaagccaatcaaaaaaggaaagaagagaaatccctggtctgattcagaatcagataggagcagtgacgaaagtaattttgatgtccctccacgagaaacagagccacggagagcagcaacaaaaacaaaattcacaatggatttggattcagatgaagatttctcagattttgatgaaaaaactgatgatgaagattttgtcccatcagatgctagtccacctaagaccaaaacttccccaaaacttagtaacaaagaactgaaaccacagaaaagtgtcgtgtcagaccttgaagctgatgatgttaagggcagtgtaccactgtcttcaagccctcctgctacacatttcccagatgaaactgaaattacaaacccagttcctaaaaagaatgtgacagtgaagaagacagcagcaaaaagtcagtcttccacctccactaccggtgccaaaaaaagggctgccccaaaaggaactaaaagggatccagctttgaattctggtgtctctcaaaagcctgatcctgccaaaaccaagaatcgccgcaaaaggaagccatccacttctgatgattctgactctaattttgagaaaattgtttcgaaagcagtcacaagcaagaaatccaagggggagagtgatgacttccatatggactttgactcagctgtggctcctcgggcaaaatctgtacgggcaaagaaacctataaagtacctggaagagtcagatgaagatgatctgttttaaaatgtgaggcgattattttaagtaattatcttaccaagcccaagactggttttaaagttacctgaagctcttaacttcctcccctctgaatttagtttggggaaggtgtttttagtacaagacatcaaagtgaagtaaagcccaagtgttctttagctttttataatactgtctaaatagtgaccatctcatgggcatngttttcttctctgcttngtctgtgtttngagtctgctttctttngtctttaaaacctgatttttaagttcttctgaactgtagaaatagctatctgatcacttcagcgtaaagcagtgtgtttattaaccatccactaagctaaaactagagcagtttgatttaaaagtgtcactcttcctccttttctactttcagtagatatgagatagagcataattatctgttttatcttagttttatacataatttaccatcagatagaactttatggttctagtacagatactctactacactcagcctcttatgtgccaagtttttctttaagcaatgagaaattgctcatgttcttcatcttctcaaatcatcagaggccgaagaaaaacactttggctgtgtctataacttgacacagtcaatagaatgaagaaaattagagtagttatgtgattatttcagctcttgacctgtcccctctggctgcctctgagtctgaatctcccaaagagagaaaccaatttctaagaggactggattgcagaagactcggggacaacatttgatccaagatcttaaatgttatattgataaccatgctcagcaatgagctattagattcattttgggaaatctccataatttcaatttgtaaactttgttaagacctgtctacattgttatatgtgtgtgacttgagtaatgttatcaacgtttttgtaaatatttactatgtttttctattagctaaattccaacaattttgtactttaataaaatgttctaaacattgcaaaaaaaaaaaaaaaaaaaaaaaaaaannnnnnnnnnnannnaannncgcctatagtgaatcctattaccattacctggccgcgttttacacctcttgattggaaaaccctgggttaccaacttaatgccttggaaaaatccactttg

SEQ ID NO: 94 - DNA, 2225 bp, Homo sapiens
cgacatggcgcgcgagctgcgggcgctgctgctgtggggccgccgcctgcggcctttgctgcgggcgccggcgctggcggccgtgccgggaggaaaaccaattctgtgtcctcggaggaccacagcccagttgggccccaggcgaaacccagcctggagcttgcaggcaggacgactgttcagcacgcagaccgccgaggacaaggaggaacccctgcactcgattatcagcagcacagagagcgtgcagggttccacttccaaacatgagttccaggccgagacaaagaagcttttggacattgttgcccggtccctgtactcagaaaaagaggtgtttatacgggagctgatctccaatgccagcgatgccttggaaaaactgcgtcacaaactggtgtctgacggccaagcactgccagaaatggagattcacttgcagaccaatgccgagaaaggcaccatcaccatccaggatactggtatcgggatgacacaggaagagctggtgtccaacctggggacgattgccagatcggggtcaaaggccttcctggatgctctgcagaaccaggctgaggccagcagcaagatcatcggccagtttggagtgggtttctactcagctttcatggtggctgacagagtggaggtctattcccgctcggcagccccggggagcctgggttaccagtggctttcagatggttctggagtgtttgaaatcgccgaagcttcgggagttagaaccgggacaaaaatcatcatccacctgaaatccgactgcaaggagttttccagcgaggcccgggtgcgagatgtggtaacgaagtacagcaacttcgtcagcttccccttgtacttgaatggaaggcggatgaacaccttgcaggccatctggatgatggaccccaaggatgtcggtgagtggcaacatgaggagttctaccgctacgtcgcgcaggctcacgacaagccccgctacaccctgcactataagacggacgcaccgctcaacatccgcagcatcttctacgtgcccgacatgaaaccgtccatgtttgatgtgagccgggagctgggctccagcgttgcactgtacagccgcaaagtcctcatccagaccaaggccacggacatcctgcccaagtggctgcgcttcatccgaggtgtggtggacagtgaggacattcccctgaacctcagccgggagctgctgcaggagagcgcactcatcaggaaactccgggacgttttacagcagaggctgatcaaattcttcattgaccagagtaaaaaagatgctgagaagtatgcaaagttttttgaagattacggcctgttcatgcgggagggcattgtgaccgccaccgagcaggaggtcaaggaggacatagcaaagctgctgcgctacgagtcctcggcgctgccctccgggcagctaaccagcctctcagaatacgccagccgcatgcgggccggcacccgcaacatctactacctgtgcgcccccaaccgtcacctggcagagcactcaccctactatgaggccatgaagaagaaagacacagaggttctcttctgctttgagcagtttgatgagctcaccctgctgcaccttcgtgagtttgacaagaagaagctgatctctgtggagacggacatagtcgtggatcactacaaggaggagaagtttgaggacaggtccccagccgccgagtgcctatcagagaaggagacggaggagctcatggcctggatgagaaatgtgctggggtcgcgtgtcaccaacgtgaaggtgaccctccgactggacacccaccctgccatggtcaccgtgctggagatgggggctgcccgccacttcctgcgcatgcagcagctggccaagacccaggaggagcgcgcacagctcctgcagcccacgctggagatcaaccccaggcacgcgctcatcaagaagctgaatcagctgcgcgcaagcgagcctggcctggctcagctgctggtggatcagatatacgagaacgccatgattgctgctggacttgttgacgaccctagggccatggtgggccgcttgaatgagctgcttgtcaaggccctggagcgacactgacagccagggggccagaaggactgacaccacagatgacagccccacctccttgagctttatttacctaaatttaaaggtatttcttaacccgaaaaaaaaaaaaaaa

SEQ ID NO: 95 - DNA, 2744 bp, Homo sapiens
  modified_base (53)..(54): a, c, g, or t
  modified_base (883)..(883): a, c, g, or t
  modified_base (1020)..(1020): a, c, g, or t
  modified_base (2552)..(2552): a, c, g, or t
  modified_base (2556)..(2556): a, c, g, or t
  modified_base (2558)..(2558): a, c, g, or t
  modified_base (2560)..(2564): a, c, g, or t
  modified_base (2566)..(2571): a, c, g, or t
  modified_base (2574)..(2576): a, c, g, or t
ttttttttttttttttttttttttttttttttttttttttttttttttttttnngcctgaaacaagtcttcatttattgactacagtacagtgatttcgcatcttagctggtaatcaaagatggttatgtattaagtaagagaagacatagtctctcttccaggtatcacctgtcagaaacctgggcaaatttaattttaagaactagaactgcatctcctggtggcagtcgtcaccctgagaacaggaacaaggcaaagaaagcatacaggattttgattctcctacacaggtgcacataaagttagtttattaatgactatattttgaagccagccattttgtccaatatttaaataacaagctgtttaatattaaagcagaaagtactgccacattgtgacagaagtacagctttatccataaacccttcacacaattatacattaaatgctatttttatttaagcaaggcacccctacttgttctaaaatatgggatgtactactccatttaaaaagcaaatgaggagactgatttttttcctatctagagctggtttaaattcaagtgaagccattaattttcttaccagtctggactgttctgacatgtcacttcacagttttgagactaacaaacacccttaggtctaccccaaaccaaaaaaagccagggagggacagtttagacaacttttaagttaagactagaatgcccccttaagtagataggcaccaccgttatacgcctttagcacaaggcttagaaaggcaaaacatttctaaagacataaaaccgccaaattgtcatttacactaagctgtggtattttttgttttgatttttaaaaattcctatctctaagtaatcaaatacagcnaaatttaaaactattctgccaaaccataccagttcaaaggtctgaaaccgttctttgctttggtgaatgtttggttaaaataaatcactgtttcactccatgagaagttttacatcagagcactcaattcacaggcnaaaaaaaaaaagttactttttaaatgaaagcgtttaaagaacactgctgaataaaaatatgtggtctttacaatgagtaacatatcatctatgaaaacaaaccatttaatcatataaaacaaagaccatatttttaaatcagatcctggacagtttaaacaaaaattttaatttgtggtttatttcataatcccaaactggatctttcatttcttcttctaaacagtccactatgaaacttttcttagaagcaattaacccaaaacaccaaaatcatttccctagcagttgctgctaataaactggaactgtatatcccaagtccaagaaagatgtgcaaatgaaatgcttcttgcttcacccttattatctggagcccctagagtcttattttccttttggacatgaattcaggaacagttcaatatacctatgatgaacgtgggaccgatccttgagcatcgctgcaacagcatcctcatgggtctcaaagtgcacatcagcttctccagtggccttcccactggagctgtattccatggtgattctaacaggcttgagtggagcaaaaaagtttataatgtcttgggcattggcttggaaaggtaatcctctcatgtggacaaaatgcagagaagacgtagttccaaaatcagcagcctctggaagcttttctggcacctccttaggcaattctatttccttctcactttcaaaagctgtcatgggttgaatatacctcatttacttcatgttcttcaaagaccatttctggctcagttatatacttagcagtaggaaaagatgcgattttctttcccttataagaaccgacatgtgttcgaacttcattccttctgcttggaaatatctcgatgtatcgattaccaatttcttccctgtgtttcaacagggcttggttggccatttctggttcttcaaattgcacataggcttcccctgtttttcgcctccctctatagtccatcacaaaagtaatgtcaactatattcagtcctgcaaagaagtctacaatgtctttctcattgcaactataaggaagtcctctcaaacgaaccacaccatcatttaccacaggcgaagatttgacctgcaagctcttcattaaggcatccacatcttcattgtttatctcatatacttccacataccgctggcccatgtacatgcggtgcttctctaaggctttctgcacatcctgctctgactccatttcaattaaggcatcaccccttcgtttcccatctctgtttaggagaaaatgtattccattctcaccgttgcggattctgcagtctgaaaaaaagttaagcacatcttccatagtgcatgaccagggcagtccttgagctcgaatgagaaagacatcatccacttcctcttctaacttggacggggccaattcatactcagggggtggtggaaggtcttccaggtaagtagttttggactcctggctgtagctgcgcgtcgggacggcggccgccgccgccagcgactgcggcagcagngagncncnnnnngnnnnnnagnnngcggcggagtagaagggcaggcaggcggcgccggtgcgccggcagctgctgcagttacagccgcagccccggagcagcgccccgagtacccagcgcgtgccggccatggactccggaggcggcgcagggcctgaaggcagctgctccagcagcgatggtgctcgtgcc

SEQ ID NO: 96 - DNA, 1746 bp, Homo sapiens
gagcctgacttcagcgctcccactctcggccgacacccctcatggccaaccgttacaccatggatctgactgccatctacgagagcctcctgtcgctgagccctgacgtgcccgtgccatccgaccatggagggactgagtccagcccaggctggggctcctcgggaccctggagcctgagcccctccgactccagcccgtctggggtcacctcccgcctgcctggccgctccaccagcctagtggagggccgcagctgtggctgggtgcccccaccccctggcttcgcaccgctggctccccgcctgggccctgagctgtcaccctcacccacttcgcccactgcaacctccaccaccccctcgcgctacaagactgagctatgtcggaccttctcagagagtgggcgctgccgctacggggccaagtgccagtttgcccatggcctgggcgagctgcgccaggccaatcgccaccccaaatacaagacggaactctgtcacaagttctacctccagggccgctgcccctacggctctcgctgccacttcatccacaaccctagcgaagacctggcggccccgggccaccctcctgtgcttcgccagagcatcagcttctccggcctgccctctggccgccggacctcaccaccaccaccaggcctggccggcccttccctgtcctccagctccttctcgccctccagctccccaccaccacctggggaccttccactgtcaccctctgccttctctgctgcccctggcacccccctggctcgaagagaccccaccccagtctgttgcccctcctgccgaagggccactcctatcagcgtctgggggcccttgggtggcctggttcggaccccctctgtacagtccctgggatccgaccctgatgaatatgccagcagcggcagcagcctggggggctctgactctcccgtcttcgaggcgggagtttttgcaccaccccagcccgtggcagccccccggcgactccccatcttcaatcgcatctctgtttctgagtgacaaagtgactgcccggtcagatcagctggatctcagcggggagccacgtctcttgcactgtggtctctgcatggaccccagggctgtggggacttgggggacagtaatcaagtaatccccttttccagaatgcattaacccactcccctgacctcacgctggggcaggtccccaagtgtgcaagctcagtattcatgatggtgggggatggagtgtcttccgaggttcttgggggaaaaaaaattgtagcatatttaagggaggcaatgaaccctctcccccacctcttccctgcccaaatctgtctcctagaatcttatgtgctgtgaataataggccttcactgcccctccagtttttatagacctgaggttccagtgtctcctggtaactggaacctctcctgagggggaatcctggtgctcaaattaccctccaaaagcaagtagccaaagccgttgccaaaccccacccataaatcaatgggccctttatttatgacgactttatttattctaatatgattttatagtatttatatatattgggtcgtctgcttcccttgtatttttcttcctttttttgtaatattgaaaacgacgatataattattataagtagactataatatatttagtaatatatattattaccttaaaagtctatttttgtgttttgggcatttttaaataaacaatctgagtgt

SEQ ID NO: 97 - DNA, 7560 bp, Homo sapiens
accggccacagcctgcctactgtcacccgcctctcccgcgcgcagatacacgcccccgcctccgtgggcacaaaggcagcgctgctggggaactcgggggaacgcgcacgtgggaaccgccgcagctccacactccaggtacttcttccaaggacctaggtctctcgcccatcggaaagaaaataattctttcaagaagatcagggacaactgatttgaagtctactctgtgcttctaaatccccaattctgctgaaagtgaatccctagagccctagagccccagcagcacccagccaaacccacctccaccatgggggccatgactcagctgttggcaggtgtctttcttgctttccttgccctcgctaccgaaggtggggtcctcaagaaagtcatccggcacaagcgacagagtggggtgaacgccaccctgccagaagagaaccagccagtggtgtttaaccacgtttacaacatcaagctgccagtgggatcccagtgttcggtggatctggagtcagccagtggggagaaagacctggcaccgccttcagagcccagcgaaagctttcaggagcacacagtagatggggaaaaccagattgtcttcacacatcgcatcaacatcccccgccgggcctgtggctgtgccgcagcccctgatgttaaggagctgctgagcagactggaggagctggagaacctggtgtcttccctgagggagcaatgtactgcaggagcaggctgctgtctccagcctgccacaggccgcttggacaccaggcccttctgtagcggtcggggcaacttcagcactgaaggatgtggctgtgtctgcgaacctggctggaaaggccccaactgctctgagcccgaatgtccaggcaactgtcaccttcgaggccggtgcattgatgggcagtgcatctgtgacgacggcttcacgggcgaggactgcagccagctggcttgccccagcgactgcaatgaccagggcaagtgcgtgaatggagtctgcatctgtttcgaaggctacgccggggctgactgcagccgtgaaatctgcccagtgccctgcagtgaggagcacggcacatgtgtagatggcttgtgtgtgtgccacgatggctttgcaggcgatgactgcaacaagcctctgtgtctcaacaattgctacaaccgtggacgatgcgtggagaatgagtgcgtgtgtgatgagggtttcacgggcgaagactgcagtgagctcatctgccccaatgactgcttcgaccggggccgctgcatcaatggcacctgctactgcgaagaaggcttcacaggtgaagactgcgggaaacccacctgcccacatgcctgccacacccagggccggtgtgaggaggggcagtgtgtatgtgatgagggctttgccggtttggactgcagcgagaagaggtgtcctgctgactgtcacaatcgtggccgctgtgtagacgggcggtgtgagtgtgatgatggtttcactggagctgactgtggggagctcaagtgtcccaatggctgcagtggccatggccgctgtgtcaatgggcagtgtgtgtgtgatgagggctatactggggaggactgcagccagctacggtgccccaatgactgtcacagtcggggccgctgtgtcgagggcaaatgtgtatgtgagcaaggcttcaagggctatgactgcagtgacatgagctgccctaatgactgtcaccagcacggccgctgtgtgaatggcatgtgtgtttgtgatgacggctacacaggggaagactgccgggatcgccaatgccccagggactgcagcaacaggggcctctgtgtggacggacagtgcgtctgtgaggacggcttcaccggccctgactgtgcagaactctcctgtccaaatgactgccatggccagggtcgctgtgtgaatgggcagtgcgtgtgccatgaaggatttatgggcaaagactgcaaggagcaaagatgtcccagtgactgtcatggccagggccgctgcgtggacggccagtgcatctgccacgagggcttcacaggcctggactgtggccagcactcctgccccagtgactgcaacaacttaggacaatgcgtctcgggccgctgcatctgcaacgagggctacagcggagaagactgctcagaggtgtctcctcccaaagacctcgttgtgacagaagtgacggaagagacggtcaacctggcctgggacaatgagatgcgggtcacagagtaccttgtcgtgtacacgcccacccacgagggtggtctggaaatgcagttccgtgtgcctggggaccagacgtccaccatcatccaggagctggagcctggtgtggagtactttatccgtgtatttgccatcctggagaacaagaagagcattcctgtcagcgccagggtggccacgtacttacctgcacctgaaggcctgaaattcaagtccatcaaggagacatctgtggaagtggagtgggatcctctagacattgcttttgaaacctgggagatcatcttccggaatatgaataaagaagatgagggagagatcaccaaaagcctgaggaggccagagacctcttaccggcaaactggtctagctcctgggcaagagtatgagatatctctgcacatagtgaaaaacaatacccggggccctggcctgaagagggtgaccaccacacgcttggatgcccccagccagatcgaggtgaaagatgtcacagacaccactgccttgatcacctggttcaagcccctggctgagatcgatggcattgagctgacctacggcatcaaagacgtgccaggagaccgtaccaccatcgatctcacagaggacgagaaccagtactccatcgggaacctgaagcctgacactgagtacgaggtgtccctcatctcccgcagaggtgacatgtcaagcaacccagccaaagagaccttcacaacaggcctcgatgctcccaggaatcttcgacgtgtttcccagacagataacagcatcaccctggaatggaggaatggcaaggcagctattgacagttacagaattaagtatgcccccatctctggaggggaccacgctgaggttgatgttccaaagagccaacaagccacaaccaaaaccacactcacaggtctgaggccgggaactgaatatgggattggagtttctgctgtgaaggaagacaaggagagcaatccagcgaccatcaacgcagccacagagttggacacgcccaaggaccttcaggtttctgaaactgcagagaccagcctgaccctgctctggaagacaccgttggccaaatttgaccgctaccgcctcaattacagtctccccacaggccagtgggtgggagtgcagcttccaagaaacaccacttcctatgtcctgagaggcctggaaccaggacaggagtacaatgtcctcctgacagccgagaaaggcagacacaagagcaagcccgcacgtgtgaaggcatccactgaacaagcccctgagctggaaaacctcaccgtgactgaggttggctgggatggcctcagactcaactggaccgcggctgaccaggcctatgagcactttatcattcaggtgcaggaggccaacaaggtggaggcagctcggaacctcaccgtgcctggcagccttcgggctgtggacataccgggcctcaaggctgctacgccttatacagtctccatctatggggtgatccagggctatagaacaccagtgctctctgctgaggcctccacaggggaaactcccaatttgggagaggtcgtggtggccgaggtgggctgggatgccctcaaactcaactggactgctccagaaggggcctatgagtactttttcattcaggtgcaggaggctgacacagtagaggcagcccagaacctcaccgtcccaggaggactgaggtccacagacctgcctgggctcaaagcagccactcattataccatcaccatccgcggggtcactcaggacttcagcacaacccctctctctgttgaagtcttgacagaggaggttccagatatgggaaacctcacagtgaccgaggttagctgggatgctctcagactgaactggaccacgccagatggaacctatgaccagtttactattcaggtccaggaggctgaccaggtggaagaggctcacaatctcacggttcctggcagcctgcgttccatggaaatcccaggcctcagggctggcactccttacacagtcaccctgcacggcgaggtcaggggccacagcactcgaccccttgctgtagaggtcgtcacagaggatctcccacagctgggagatttagccgtgtctgaggttggctgggatggcctcagactcaactggaccgcagctgacaatgcctatgagcactttgtcattcaggtgcaggaggtcaacaaagtggaggcagcccagaacctcacgttgcctggcagcctcagggctgtggacatcccgggcctcgaggctgccacgccttatagagtctccatctatggggtgatccggggctatagaacaccagtactctctgctgaggcctccacagccaaagaacctgaaattggaaacttaaatgtttctgacataactcccgagagcttcaatctctcctggatggctaccgatgggatcttcgagacctttaccattgaaattattgattccaataggttgctggagactgtggaatataatatctctggtgctgaacgaactgcccatatctcagggctaccccctagtactgattttattgtctacctctctggacttgctcccagcatccggaccaaaaccatcagtgccacagccacgacagaggccctgccccttctggaaaacctaaccatttccgacattaatccctacgggttcacagtttcctggatggcatcggagaatgcctttgacagctttctagtaacggtggtggattctgggaagctgctggacccccaggaattcacactttcaggaacccagaggaagctggagcttagaggcctcataactggcattggctatgaggttatggtctctggcttcacccaagggcatcaaaccaagcccttgagggctgagattgttacagaagccgaaccggaagttgacaaccttctggtttcagatgccaccccagacggtttccgtctgtcctggacagctgatgaaggggtcttcgacaattttgttctcaaaatcagagataccaaaaagcagtctgagccactggaaataaccctacttgcccccgaacgtaccagggacttaacaggtctcagagaggctactgaatacgaaattgaactctatggaataagcaaaggaaggcgatcccagacagtcagtgctatagcaacaacagccatgggctccccaaaggaagtcattttctcagacatcactgaaaattcggctactgtcagctggagggcacccacggcccaagtggagagcttccggattacctatgtgcccattacaggaggtacaccctccatggtaactgtggacggaaccaagactcagaccaggctggtgaaactcatacctggcgtggagtaccttgtcagcatcatcgccatgaagggctttgaggaaagtgaacctgtctcagggtcattcaccacagctctggatggcccatctggcctggtgacagccaacatcactgactcagaagccttggccaggtggcagccagccattgccactgtggacagttatgtcatctcctacacaggcgagaaagtgccagaaattacacgcacggtgtccgggaacacagtggagtatgctctgaccgacctcgagcctgccacggaatacacactgagaatctttgcagagaaagggccccagaagagctcaaccatcactgccaagttcacaacagacctcgattctccaagagacttgactgctactgaggttcagtcggaaactgccctccttacctggcgacccccccgggcatcagtcaccggttacctgctggtctatgaatcagtggatggcacagtcaaggaagtcattgtgggtccagataccacctcctacagcctggcagacctgagcccatccacccactacacagccaagatccaggcactcaatgggcccctgaggagcaatatgatccagaccatcttcaccacaattggactcctgtaccccttccccaaggactgctcccaagcaatgctgaatggagacacgacctctggcctctacaccatttatctgaatggtgataaggctcaggcgctggaagtcttctgtgacatgacctctgatgggggtggatggattgtgttcctgagacgcaaaaacggacgcgagaacttctaccaaaactggaaggcatatgctgctggatttggggaccgcagagaagaattctggcttgggctggacaacctgaacaaaatcacagcccaggggcagtacgagctccgggtggacctgcgggaccatggggagacagcctttgctgtctatgacaagttcagcgtgggagatgccaagactcgctacaagctgaaggtggaggggtacagtgggacagcaggtgactccatggcctaccacaatggcagatccttctccacctttgacaaggacacagattcagccatcaccaactgtgctctgtcctacaaaggggctttctggtacaggaactgtcaccgtgtcaacctgatggggagatatggggacaataaccacagtcagggcgttaactggttccactggaagggccacgaacactcaatccagtttgctgagatgaagctgagaccaagcaacttcagaaatcttgaaggcaggcgcaaacgggcataaattggagggaccactgggtgagagaggaataaggcggcccagagcgaggaaaggattttaccaaagcatcaatacaaccagcccaaccatcggtccacacctgggcatttggtgagaatcaaagctgaccatggatccctggggccaacggcaacagcatgggcctcacctcctctgtgatttctttctttgcaccaaagacatcagtctccaacatgtttctgttttgttgtttgattcagcaaaaatctcccagtgacaacatcgcaatagttttttacttctcttaggtggctctgggatgggagaggggtaggatgtacaggggtagtttgttttagaaccagccgtattttacatgaagctgtataattaattgtcattatttttgttagcaaagattaaatgtgtcattggaagccatccctttttttacatttcatacaacagaaaccagaaaagcaatactgtttccattttaaggatatgattaatattattaatataataatgatgatgatgatgatgaaaactaaggatttttcaagagatctttctttccaaaacatttctggacagtacctgattgtattttttttttaaataaaagcacaagtacttttgaaaaaaaaccggaattc

SEQ ID NO: 98 - DNA, 1418 bp, Homo sapiens
aactgtgcgaaccagacccggcagccttgctcagttcagcatagcggagcggatccgatcggatcggagcacaccggagcaggctcatcgagaaggcgtctgcgagaccatggagaacggatacacctatgaagattataagaacactgcagaatggcttctgtctcatactaagcaccgacctcaagttgcaataatctgtggttctggattaggaggtctgactgataaattaactcaggcccagatctttgactacagtgaaatccccaactttcctcgaagtacagtgccaggtcatgctggccgactggtgtttgggttcctgaatggcagggcctgtgtgatgatgcagggcaggttccacatgtatgaagggtacccactctggaaggtgacattcccagtgagggttttccaccttctgggtgtggacaccctggtagtcaccaatgcagcaggagggctgaaccccaagtttgaggttggagatatcatgctgatccgtgaccatatcaacctacctggtttcagtggtcagaaccctctcagagggcccaatgatgaaaggtttggagatcgtttccctgccatgtctgatgcctacgaccggactatgaggcagagggctctcagtacctggaaacaaatgggggagcaacgtgagctacaggaaggcacctatgtgatggtggcaggccccagctttgagactgtggcagaatgtcgtgtgctgcagaagctgggagcagacgctgttggcatgagtacagtaccagaagttatcgttgcacggcactgtggacttcgagtctttggcttctcactcatcactaacaaggtcatcatggattatgaaagcctggagaaggccaaccatgaagaagtcttagcagctggcaaacaagctgcacagaaattggaacagtttgtctccattcttatggccagcattccactccctgacaaagccagttgacctgccttggagtcgtctggcatctcccacacaagacccaagtagctgctaccttctttggccccttgctggagtcatgtgcctctgtccttaggttgtagcagaaaggaaaagattcctgtccttcacctttcccactttcttctaccagacccttctggtgccagatcctcttctcaaagctgggattacaggtgtgagcatagtgagaccttggcgctacaaaataaagctgttctcattcctgttctttcttacacaagagctggagcccgtgccctaccacacatctgtggagatgcccaggatttgactcgggccttagaactttgcatagcagctgctactagctctttgagataatacattccgaggggctcagttctgccttatctaaatcaccagagaccaaacaaggactaatccaatacctcttgga

SEQ ID NO: 99 - DNA, 5515 bp, Homo sapiens
  modified_base (37)..(39): a, c, g, or t
  modified_base (706)..(712): a, c, g, or t
  modified_base (714)..(714): a, c, g, or t
  modified_base (716)..(720): a, c, g, or t
  modified_base (5454)..(5454): a, c, g, or t
ttttttttttttttttttttttttttttttttttttnnnttttaatatgatattttattatgggtgtctgtaaggaaaaaaaagatcaacaaccacatacaagcttacaaagttaaatttcaacacattctctatgctagtgtgacaaaagcagccccataatttggtttttattgttgacctttacaggatgaaggaggagaatcccctgtggcatgccaatgaatctttctgatgggagacatgtacagattttgtgcatttatgttctgaatgcaagtcaacaattctgatctagagtttaaaagtgaaagtacattagcaccataacatgcgtctttaaagccttcccaaatattagtaatcttgaccagcaatgacaagaaaaaagaggagcacctttacaagcagttgatatccaatattaaaataattgtggctttaaaaatatttctttaaattcttgcattacacttttctttttaaaccaatcttccaggagattaatcaatgaaatttataagttttatcaacgtataaaatttttttcatcttctgggactcatagaatacaatctgtgtttctgaccagttgaggtagttaaaatagggagggcttttctaatttcgtatttgactatttcagaaagaaaggttatcttttactggtgagcacagtcattgctctgcagatgggctaggattnnnnnnntntnnnnnttttttgttatcataaagagtgttgaagtttatttattatagcaccattgagacattttgaaattggaattggtaaaaaaataaaacaaaaagcatttgaattgtatttggtggaacagcaaaaaaagagaagtatcatttttctttgtcaaattatactgtttccaaacattttggaaataaataactggaattttgtcggtcacttgcactggttgacaagattagaacaagaggaacacatatggagttaaattttttttgttgggatttcagatagagtttggtttataaaaagcaaacagggccaacgtccacaccaaattcttgatcaggaccaccaatgtcatagggtgcaatatctacaataggtagtctcacagccttgcgtgttcgatattcaaagactgttttgctccattccccagtgtgtttcgtgcaaccatcctccagaactgtgtaggtgaatttgctatttccttcagccttgaattcaccttcatttgaccccatcagcttcagggccttctttacatttccactggcctgatccatgtatgcaatgctatttttgcagtgatatgtgatgttctgggaagctcggctggagagaagtcgaaggaatgccagctgcacatcaaggacatcttcaggaagttcaggattgccgtagctaaactgaaaaccaccatccatggactctccaaaccaaacgtgtttcttctcagcactagaatctgtccaccagtgtttccgtggaacattcaaaggattggcacttatgcatgtttccccagtttccatattacagaataccttgatagcatccaatttgcatccttggttagggtcaacccagtattctccactcttgagttcaggatggcagaatttcaggtctctgcagtttctagcggggtttttacgagaaccatcaggactaatgaggctttctatttgtccattaacagacttgagtgaagtcataatctcatcggtgttgattttgaaatccattggttcatctccataatacggggcaaaaccgccagctttttcacctccaatcccagcaatggcagcggctccaacaccaccacagcaaggaccaggggcaccaggaggtccaggagggcctggttgccctgggtggcctggggagccctcagatcctctttcacctctgttacctcgaggccctggtggtccaatgggacctggatgtccactggttccatctttgccaggaggtccactgggtccaacaggtcctctggggcctgcaggtcctggactgccgattgcaccctgctgaccagcagggcctggagaacctggggcacctggattaccagggaatcctcgatgtcctttgatgccagcagctccacgttcacctgtttcacctttgtcaccacgtgggccttgaggaccaggagcacctcgggaaccagcaggaccgggagcaccagcagggccagcagggccactttctcctctgtcaccactctttccagctggaccgacaggaccaggtgggcctggatgaccaggagcgccaggggcaccaggagagccattttcaccacgatcacccttgccaccaggagatccatctcggcctggaagaccatctgatccagggtttccatctcttccaggttcaccagctgtaccagccagaccaggaagaccctggggtccagggggaccacgttctccactgagaccgttagctcctggtttcccactttcacccttgacaccctgagggccagggcttcccctaggacctggcatgcctggtggtcctgcaagaccccgtgctccagtgatcccagcaatcccaagtgggcctggagctcctggtgggccctgggcaccaggcgatcccttctctcctggttggccagcatcaccttttggtccagacactccagggctgccaggagcaccagtgttacccgcaggacctgggggcccatccttgcctggagaaccgctgggacctgggggtcctgggttaccattactaccaggaggaccaggaagaccacgagcaccagggaagccagcagcaccaggtccaccaggactgccacgttcacctttgacaccttggggaccaggaggaccagcaggtccagaacctccagggggtcctgcaactccaggagggcctccttcacctttctcacccggagcccctctttctcctttaccaccaggttcaccattctgtccaggagcaccagggaaaccagcaggtcctggagggccagtttcacctctctcaccagggctaccacgaggtccagctatacctggaagtccgggggcaccaccttcacccttatctccaggctggccagctgggccaggaggaccaataggaccagtaggaccccttgggccatctttccctgggacaccatcagcacctgggccgcctggttcacccttgtcaccctttggaccaggacttccaagacctcctctttctccaggcattccttgcagaccaggagtaccagcagcaccaggtggcccaggaggaccagcagcaccctttcctccttcgggaccagggggaccagctccacctctaagtcctggggcccctgccaatccaggaggtccacgttcaccaggggcaccagcatcacccttgcctcctggagctccaggtgcaccggcatcaccctttggacctggttccccaggttttccattttctcctggaggaccacctgtaccaggcaagccttgtaatccttgtggaccagggggtcctgtgtctcctttgtcaccaccaggcccagtaggccctgggggtccttgaggtccagtttcaccattctttccaggaggaccctgagggccaggtcctccagggccacctcgttctccattcttaccaggagcaccatcatttcctttaggaccggggaagcccatgacaccaggctgacctcggggaccagatggcccaggaggacctggtcgaccactttctccttgacttccgggaggccctggtttcccatcacttcctggtcctcctggacttccgggcatgcccctcattcctggacctccagggacgccatctctgccaggttctccagcagctcctctgggccctgcagggcctggagcaccacgctctccagcaggacccttttctcctgggatgccatttggtccagcaggtcctcggaacccaggggcacccctttctcctgcagctcctggaagcccatttgcaccaggttctccaggtgatccatccttgccatcttcgcctttagctcctggaacacctggaataccagcctcaccgcgttcaccacgtggtccgggctctcctttggcaccattcttaccaggctcacctgcaccacctcgcagtccaggagcaccattagcaccggctggtcctggaggaccccgggctcccatcagtccaggagctccaggaatgccagcgggacccatttcgcctttaccaccaggactaccattaatcccaggagggccaggaggaccttgagcaccagcgtgtccctgaggtccaggttctcctctttgtccaggggcaccatttgaaccaggagaccctgcaggtccaacttcacccttagcaccaggggatccagggaatccggcagttccaggaggaccaggagggcctggttgaccatcactgcctcgagcaccgtcattaccccgagcacctgcagccccaggaagtcctggccgtcctcgctcaccaggagcccctcttggacccatgggtccaggagctccattttcgcctggaagaccattttcaccctttaatccaggagcacctgtttcacccttttctccatttcgtccatcgaagcctctgtgtcctttcataccagggaatccaggtatcccagctggacctttgatacctggaggtccaggcaatcctcgctctccaggtcgtccgggtctacctgattctccatcttttccagcaggaccagatggacctatagcaccaggaggtcctggagggcctgaaggaccagcttgcccaggttcaccagggggtccttggtatcctggagatccaggggaaccaggatgaccagatgtaccagggggaccgggagggcctggggggccagctggtccaggatagcctgcgagtcctcctactgctactccagacttgacatcatatgaatcatactggggagaatagttctgaggaccagtagggcatgattcacagattccaggggggccaggagaaccaggggaccctggttgtcctggaataccagggtcaccatttctcccaggaataccaggagggcctggatctcccttggggccttgaggtccttgaccattaggagggcgagtaggagcagttggaggctgtgggcaaactgcacaacattctccaaatggaatttctgggttggggcagtctaattcttgatcgtcacatattatgtcatcgcagagaacggatcctgagtcacagacacatatttggcatggttctggcttccagacatctctatccgcataggactgaccaagatgggaacatcctccttcaacagcttcctgttgtgccaaaataatagtgggatgaagcagagcgagaagtagccagctccccttttgcacaaagctcatcatgtctaaatatcagacatgagactctttgtgcaaaaaggagaaaanaaaagcagttcaaagtagcaccatcaagttgttccctgcccttcagcaccgggcccgtcat

SEQ ID NO: 100 - DNA, 1998 bp, Homo sapiens
  modified_base (485)..(507): a, c, g, or t
  modified_base (509)..(510): a, c, g, or t
  modified_base (513)..(513): a, c, g, or t
  modified_base (515)..(515): a, c, g, or t
  modified_base (519)..(519): a, c, g, or t
  modified_base (548)..(548): a, c, g, or t
gaattccattcattacggagttagtttctgctaaatacttactgatgctagagcagacccctggcatctgaggatttaagagttcaactgttctcaatctatgctaaaaaaaaaaaaatgacaaataataaattctacatttccgaggcactaatttgaacttcagaagtgggagggctgatatgtaaggcaagttatttaggaatgaggagggctgacagctgtaactcagtgtggttttgcagctgcctacgttagtaccaggtattccataaaactctgtagaggtcatttacatttcgtaaattctgtaattacaccttactgtatcatgccctagtagtttcacaaacttagatattcacaaaaatgttttggaatatattccttgggaatgtgaagggtctcctatattacattaaacaaaaaaccatgcagttacttagagctcatagagctttctcaaaatcaactactgatcatannnnnnnnnnnnnnnnnnnnnnntnnttntntttntggcaggcaaaatttctttttattgtagngcaattacttaaactggaaatttggctttatgcataataagtcatgtgggtaaaacatccacattgcagttaggtttccagtatctagcttttatttattttttagcaatgacattaacaagattttgccaggttataaaaatgagggctttcttgagaattacttatagtttccgagttgaatggcagagcgcacgtagacacatctgaaggtggatggctgtatctcccagtactggaccgggttgctgaaaagactcacacccgaataagaagcctttttggtgttgtgtccaggtgggcagaagtcacttgatccaactacagagatattgttgttatgaaggtagacaacctggatgtacttatgctctgccagcccaccaggtactctggtaagcttgttgttgtccaagtgaagctccctcagatgaggcgtgttggccagagagccattgtcaacagcagagatgctgttgaaactcaatcccaacttagccaaattattcagtcctttcaggctagctgcatcaactctgctgattttgttgccatcaagatgtaattccgtaagggaaggaggaagaccttgaggaatgctggtgatattggtatcagcaatgcggatgtaggagagcttcttcattccctggaaagccccattttcaattcctgagctcttcagcggattggtgcccagttctatgacaatcatctggttcagtccattgaaagtaacttttcgcactttggtgatctcattctcatgggcacgcagctcctgaagagttttgggcattttttctggcaattccttcagctgattcttggacagataaagtcgttccaacttcaccaaaggtgtaaatgctccaggactaactttgctaattttattgttgacaagaatcaatgcgtgaaggttcttcaggttcttaaagtctccatctttgatttcggttattttgttgttttgcaggtctagcagagttgtgtcagggggaagatcctttggcactttgtccagacccaaatcagaacactggaccactcgaagatggcattgacagcggaaggggcacactgggcctagggagggctcgaagtcgcggtcatcaggaacttctgggcctatcccagaagcctcatcttctagcataaagtcaaataagcctctctgttgaaacggtccagcccaggaaacttgtgcaagcagaaggaggatgatagtggccttcatgatttatctcatgtattttcacaaccagggaaccttttaatccgggaatttgccacaggagccctcacgtaagctgagatgtaattacactaaatattcagcccaagtaaaagagtttgcaggtgtggaaaggaggagggggtaggtgctgctctgtgactaggttgaaaacctcctgcttctactccatagcacagttaaaaaataatc

SEQ ID NO: 101 - DNA, 3304 bp, Homo sapiens
gcgaccgaacgcggcggtcggcagcgttcgcgcgggggcctgcgaagcgctgctcggggccggcactgcccgcggggaggacgcgccgccgccgccacccagcgccgccgccgccgccgcctccagccgggccgccgcgcgtcccgggggccggccccgcgagcgcaggagtaaacaccgccggagtcttggagccgctgcagaagggaataaagagagatgcagggatttgtgaggttacggcgccccagctgcaagatgcactagccggctgaacccgggatcggctgacttgttggaaccggagtgctctgcacggagagtggtggatgagttgaagttgccttcccggggctcattttccacgctgccgagaggaatccgagaggcaaggcaatcacttcgtcttgccattgattgggtatcgggagctttttttttctcccctctctctttcttttcctccgtcttgttgcatgcaagaaaattacagtccgctgctcgcccgccctgggtgcgagatattcagccccgctctctcccgtgcattgtgcaacccaaagatgaaagaccgaaggggagaaagttaaagaaatcgcccacatgcgctggatcagtccacggcttggggaaaggcatccagagaaggtgggagcggagagtttgaagtctttacaggcgggaagatggcggactggagctgaaagtgttgattgggaaacttgggtgattcttgtgtttatttacaatcctcttgacccaggcaggacacatgcaggccaaaaaacgctatttcatcctgctctcagctggctcttgtctcgcccttttgttttatttcggaggcttgcagtttagggcatcgaggagccacagccggagagaagaacacagcggtaggaatggcttgcaccaccccagtccggatcatttctggccccgcttcccggagcctctgcgccccttcgttccttgggatcaattggaaaacgaggattccagcgtgcacatttccccccggcagaagcgagatgccaactccagcatctacaaaggcaagaagtgccgcatggagtcctgcttcgatttcaccctttgcaagaaaaacggcttcaaagtctacgtatacccacagcaaaaaggggagaaaatcgccgaaagttaccaaaacattctagcggccatcgagggctccaggttctacacctcggaccccagccaggcgtgcctctttgtcctgagtctggatactttagacagagaccagttgtcacctcagtatgtgcacaatttgagatccaaagtgcagagtctccacttgtggaacaatggtaggaatcatttaatttttaatttatattccggcacttggcctgactacaccgaggacgtggggtttgacatcggccaggcgatgctggccaaagccagcatcagtactgaaaacttccgacccaactttgatgtttctattcccctcttttctaaggatcatcccaggacaggaggggagagggggtttttgaagttcaacaccatccctcctctcaggaagtacatgctggtattcaaggggaagaggtacctgacagggataggatcagacaccaggaatgccttatatcacgtccataacggggaggacgttgtgctcctcaccacctgcaagcatggcaaagactggcaaaagcacaaggattctcgctgtgacagagacaacaccgagtatgagaagtatgattatcgggaaatgctgcacaatgccactttctgtctggttcctcgtggtcgcaggcttgggtccttcagattcctggaggctttgcaggctgcctgcgtccctgtgatgctcagcaatggatgggagttgccattctctgaagtgattaattggaaccaagctgccgtcataggcgatgagagattgttattacagattccttctacaatcaggtctattcatcaggataaaatcctagcacttagacagcagacacaattcttgtgggaggcttatttttcttcagttgagaagattgtattaactacactagagattattcaggacagaatattcaagcacatatcacgtaacagtttaatatggaacaaacatcctggaggattgttcgtactaccacagtattcatcttatctgggagattttccttactactatgctaatttaggtttaaagcccccctccaaattcactgcagtcatccatgcggtgacccccctggtctctcagtcccagccagtgttgaagcttctcgtggctgcagccaagtcccagtactgtgcccagatcatagttctatggaattgtgacaagcccctaccagccaaacaccgctggcctgccactgctgtgcctgtcgtcgtcattgaaggagagagcaaggttatgagcagccgttttctgccctacgacaacatcatcacagacgccgtgctcagccttgacgaggacacggtgctttcaacaacagaggtggatttcgccttcacagtgtggcagagcttccctgagaggattgtggggtaccccgcgcgcagccacttctgggataactctaaggagcggtggggatacacatcaaagtggacgaacgactactccatggtgttgacaggagctgctatttaccacaaatattatcactacctatactcccattacctgccagccagcctgaagaacatggtggaccaattggccaattgtgaggacattctcatgaacttcctggtgtctgctgtgacaaaattgcctccaatcaaagtgacccagaagaagcagtataaggagacaatgatgggacagacttctcgggcttcccgttgggctgaccctgaccactttgcccagcgacagagctgcatgaatacgtttgccagctggtttggctacatgccgctgatccactctcagatgaggctcgaccccgtcctctttaaagaccaggtctctattttgaggaagaaataccgagacattgagcgactttgaggaatccggctgagtgggggaggggaagcaagaagggatgggggtcaagctgctctctcttcccagtgcagatccactcatcagcagagccagattgtgccaactatccaaaaacttagatgagcagaatgacaaaaaaaaaaaaggccaatgagaactcaactcctggctcctgggactgcaccagactgctccaaactcacctcactggcttctgtgtcccaagactaggttggtacagtttaattatggaacattaaataattatttttgaaaaaaaaaaaaaaaaaa

SEQ ID NO: 102 - DNA, 1811 bp, Homo sapiens
ggtttgtgtagagaggcgtgcagagcccgttgtccggagtgcacctgctgcctgttctgtccctcccgggagcccccgccgctgtcgccgtcgagtcgccatggaagtgcagaaagaggcacagcgcatcatgaccctgtcggtgtggaagatgtatcactcccgcatgcagcgcggtggcctgcggctgcaccggagtctgcagctgtcgctggtcatgcgcagcgcccgggagctctacctctcggccaaggtggaggccctcgagcccgaggtgtcgttgccggccgccctcccctctgaccctcgcctgcacccgccccgagaagccgagtccacggccgagacagcgacccccgacggtgagcacccgtttccggagccaatggacacgcaggaggcgccgacagccgaggagacctccgcctgctgtgccccgcgccccgccaaagtcagccgcaaacgacgcagcagcagcctgagcgacggcggggacgttggactggtcccgagcaagaaagcccgtctggaagaaaaggaagaagaggagggagcgtcatccgaagtcgccgatcgcctgcagccccctccgggccaagcggagggcgcctttcccaacctggcccgcgtcctgcagaggcgcttctccggcctcctgaactgcagccccgcggcccctccgacggcgccgcccgcgtgcgaggcaaagcccgcttgccgcccggcggacagcatgctcaacgtgctcgtgcgggccgtggtggccttctgaggaccccgagcggcgctgccggagcccagagcgcgcgtcgaaccgtcggcccgagggcgcagacctgaggcgaggccacccccctccatcctgggggaagcgcccgcgaaaaccgtggagagaagccgccgcccgggctgctgagaggcccggagaggactctgtccccggggagccatcgccttcagtgtgcagggacggcaccgaggagtctgagccgggcgcgggcgccttccgcagagacctgcgcccacaggtgctgtcttagtggactgggacgtgaacctttcgctctccttctggactgggagaagggaggcttgggtgttgtgttttttgttttgtttgtttgtttgtttttaaagatctcctcagggtcggacttcattttgtactgtgggctgtgctggccctttcaaggtttttcaagagttggttttgcgtttccaacctcggagaattccaggcactccccttccccctccgctgacatacttgtataagcggtcatcgttgcgtcatggggcaggcgtggggagcttcctgtcgccttggctgggtgtgggcctggaggaaggtcctggggcgtgcactcgcctgggcagtggggaggagagtggcctgagttacttcacccccgcgtgctgctggttaatgtcccgcgtctctgcaccttcgggtgggagcggggactgatctactttcacattctcaagtttttctcatctgcattagaggtccccagtaggttcccaggttccagcgtgcccctccctcagacacacggacacaatcagccgagaagttcctggtctgaatcacgagaatgtggaggggtggggggtgtcagtggaaaggcataaggctgagctgagaccagttgctggtgaaactgggccaatctggggaggggaacatccttgccagggagtttctgagggtctgctttgtttacctttcgtgcggtggattctttttaactccgtctacctggcgttttgttagaaatgtcagataggaaaataaaaaccatttgagt

SEQ ID NO: 103 - DNA, 952 bp, Homo sapiens
tgaactctggatgctgttagcctgagactcaggaagacaacttctgcagggtcactccctggcttctggaggaaagagaaggagggcagtgctccagtggtacagaagtgagacataatggaatcaggcttcacctccaaggacacctatctaagccattttaaccctcgggattacctagaaaaatattacaagtttggttctaggcactctgcagaaagccagattcttaagcaccttctgaaaaatcttttcaagatattctgcctagacggtgtgaagggagacctgctgattgacatcggctctggccccactatctatcagctcctctctgcttgtgaatcctttaaggagatcgtcgtcactgactactcagaccagaacctgcaggagctggagaagtggctgaagaaagagccagaggcctttgactggtccccagtggtgacctatgtgtgtgatcttgaagggaacagagtcaagggtccagagaaggaggagaagttgagacaggcggtcaagcaggtgctgaagtgtgatgtgactcagagccagccactgggggccgtccccttacccccggctgactgcgtgctcagcacactgtgtctggatgccgcctgcccagacctccccacctactgcagggcgctcaggaacctcggcagcctactgaagccagggggcttcctggtgatcatggatgcgctcaagagcagctactacatgattggtgagcagaagttctccagcctccccctgggccgggaggcagtagaggctgctgtgaaagaggctggctacacaatcgaatggtttgaggtgatctcgcaaagttattcttccaccatggccaacaacgaaggacttttctccctggtggcgaggaagctgagcagacccctgtgatgcctgtgacctcaattaaagcaattcctttgacctgtca

SEQ ID NO: 104 - DNA, 3317 bp, Homo sapiens
ccccagcgaggctccgggagcccttgcctgcgggggtccggggactcgagccggcctccgccccccggacgcacagccagcgtggtccccgcgtgcaacgcgagcgccggggagtggctcctgctttgcccctcgtgggggccgagccaagaccagtctgcaaactccatcccgccggctggaagaagtcgcggagccggcaccaaacccgcagcgtcttcccgcgcggatcccgggacttaaaaagccggggccaccccggcccaggacgggatgcgggtcggtccggtgcgctctgccatgagcggcgcctcgcagccccgcggcccggccctgctcttcccagccacccgaggcgtcccggccaaacgcctgctggacgccgacgacgcggcggctgtggcggccaagtgcccgcgcctctccgagtgctccagccccccggactacctcagcccccccggctcgccctgcagcccgcagcccccgcctgccgctccgggggccggcggaggctccgggagcgcgccggggcccagccgcatcgccgactacctgctgctgcccctagccgagcgcgagcatgtgtcccgggcgctgtgcatccacactggacgcgagctgcgctgcaaggtgtttcccattaaacactaccaggacaaaatcaggccttacatccagctgccatcgcacagcaacattactggcattgtggaagtgatccttggggaaaccaaggcctatgtcttctttgagaaggactttggggacatgcactcctatgtgcgaagccggaagaggctgcgggaagaggaagccgcccggctcttcaagcagattgtctccgccgtcgcccactgccaccagtcagccatcgtgctgggggacctgaagcttaggaagttcgtcttctccacggaggagagaacccagcttagactagaaagtctagaagacacacacataatgaagggggaagatgatgctttgtcagacaaacatggctgcccagcctacgtgagccctgagatcctcaacaccactgggacctactccggaaaggctgcggacgtttggagcctgggggtgatgctctacacccttctggttggacgataccccttccatgactcagaccccagtgcccttttctccaaaattcggcgtggacagttctgcattcctgagcacatttcccccaaagccaggtgcctcattcgcagcctcttgagacgggagccctccgagagactcactgcccccgagatcctactgcacccctggtttgagtccgtcttggaacccgggtacatcgactcagaaataggaacttcagaccagattgttccagagtaccaggaggacagtgacattagttccttcttctgctaatccccaaaacctcagaaacctcataattcttaacacctggcatttccatttctaaagatggacaggccctttggcatggtaccaaccagataatgactgcatcaggatgaaagctgctgaactcggcatggcgcctcctcttctctgttgggatgagtgactttattgatttgagcagcatatgctgtgattggctgccctgcaaatttgtttcccttaaggaaccctcaccaactatctctgctggatttgggagttccgcatcttttgtggagggcagagtatggacatcttacacccggtggtcaagtgtgtaataaacttgagcattcgaatgggagaaaaagcaaatcgcacaatgacatattttgagtaataaccgtatttttcacagggtgacaaattgggccaataaatctgccatctttgaactcatctttggtggctagactgctacggcagcttctctgatgggaaagttccttttttggcttaacactcaccctttcttcacactcacatttaccaatgactctgctccgtttttggagcagactgttttaagttgctcaggagcctgatggaaccatgaaccgagactcttctctgtttcctgccaagacctcatctgcactaatgccttctccctgaccttgacacttccccctttagctataaaagcacttaccagccgaacgtggaacagtatcacaaaagattccatctcccaacgatttcagaactctgagctcagagagactccagattttaaaaaataatttgagtgcttggaaactattagctttttaagttccttccaaatatgttagtacctaccctttactttttccccaagaccatctcagggtggagcattctgtctaagagaagaaagataaggaggctcccacccacctctcccaagagcagacattaaacatctttgtgctttgaagagagtgaattttggatagtcttgtgattctcagactaacttccagaattatactttaacccctcccagatatggtccgcctttggcattgtgtgtacatctgcagttttgcatggtgggttgttaatatttcaaatgtgtggtttatgaatacgtctgtataatcggcttctggagtgaaacagcaaaccccaaatcttcaaagttggaaggaactttaaaaatcatccggtccaatctctttcctctttctgccacctcccaaggcagaaatcccctcttcagcttcttttgtaggtgggaatccagcctctgttagatatgtccagagatggaaactcactcccctacaaaagatggagcttaatggagaaattgcaactttcattaaaaaacaaattcagatgaaatatcagtaactgtcttggacagtgctgaaatcaggtggttaaacgggtaaacaaaatatactgtattttgagaaatggcacaaaaacaggcagtcatctttaagggctatgcctaggcaaactactaacatgcattgtgagaatgccgtgtatacctcacgtactgtgtactttgtacatatattttaccttttatacctatgttcgattttgttttgttttgttctggctttgaggcttgttttgttgtctgtgtctgtctgaataacctgcgtgtctaaaaccacgtgaaatgtgaatgattattggcaatattaccttgacagaatcatgggactttgagaagagggaggacagaggcctctgtcgcactaacgctctcgtggttgctcgactgttgtatctgtgatacattatccgactaaggactctgggctggcagggccttctgccgggaaagctagaaacactaggttcttcctgtacatacgtgtatatatgtgaacagtgagatggccgtttctgacttgtagagaaattttaataaacctggtttcgta

SEQ ID NO: 105 - DNA, 6741 bp, Homo sapiens
  modified_base (758)..(758): a, c, g, or t
  modified_base (760)..(760): a, c, g, or t
  modified_base (762)..(766): a, c, g, or t
  modified_base (768)..(775): a, c, g, or t
  modified_base (777)..(782): a, c, g, or t
  modified_base (810)..(810): a, c, g, or t
  modified_base (812)..(812): a, c, g, or t
  modified_base (928)..(928): a, c, g, or t
  modified_base (1203)..(1203): a, c, g, or t
  modified_base (1207)..(1207): a, c, g, or t
  modified_base (1420)..(1424): a, c, g, or t
  modified_base (1485)..(1485): a, c, g, or t
  modified_base (1501)..(1501): a, c, g, or t
  modified_base (1542)..(1545): a, c, g, or t
  modified_base (1692)..(1692): a, c, g, or t
  modified_base (1841)..(1841): a, c, g, or t
  modified_base (1892)..(1892): a, c, g, or t
  modified_base (1931)..(1938): a, c, g, or t
  modified_base (1940)..(1948): a, c, g, or t
  modified_base (2009)..(2009): a, c, g, or t
  modified_base (2871)..(2871): a, c, g, or t
  modified_base (2873)..(2873): a, c, g, or t
  modified_base (3020)..(3020): a, c, g, or t
  modified_base (3380)..(3380): a, c, g, or t
aagcttaaaaaggagtaggcgggaggcgggggcacgatggttccccagaccaccccagcccaggggggttgtgttctggggattcaggaggtcgaggcacccagtccgtggtgagcagggccaggtctccttccttcccaagagcacggtgcgagtgccttccccacagctctcccaggtgtctgtctccctcactcccccagggccaggacagcgagcagggagcacgccttcctcctggtccctcccagaccctcgccaggctcagcagacccctctcctgttgcgttgctccttcggcaggaggtcagcgtgggtgagaagggagcagaggccagatgacccttcatgtcagttcaaggagaggcccccaggtcctcctcacgggttccactcccctcaccctcccagtatccatgagcatcccaccgccaccaagtgcagggcatccagggggtggagagtggatgggcttgaaggggagtgggtatgaggtttggacaaccccagatgtgaagagtgtgtgtgtgtgttgtgcacgtggattgcctgtatggtattgcaggggagaagaggatttggaaaaggtgcaaggaaattgcaagaatagaaaatgaaagaggaagtagaaaggtttgcggtataagaagggtgagagaaaggggagtggggttatggagggatctagaagagaatagtggggagggaaagggcaggaatggaaggcaagcccatcaccccaaggccccttccccatntntnnnnntnnnnnnnntnnnnnntttttttttttttttttttttttttttntntttgggtcatttccacatgctttattccagcaatcaaaataattaaaaacatctcaaattattatacacatacaaaataggtacagagtcttttgcttcctcccacccctaggggnaaaaactgctttgtgctttgggaagttgtctctgaaacccggggacagaggacgcaggacagactaggagggagccgggaggatgggctgcagctgtggaggagggtttcagaggagagaggtcggagagcagaggcctgagaagccagaggcaggtggagagagggtggaaagtgagcagcgggctgggctggagccgcacacgctctcctcccatgttaaatagcacctttagaaaaattcacaagtccccatccacaaaaaaaaaaaaaaanaaanaaaaaatatcaaggaataaaaatagactttgaacaaaaaggaacatttgctggcctgggggggcatctcaatttctatagcaccagtgattccctccccaccccacccatcacatagatgtagcacctttggtataaaaatggggagccgcttccaccctgcccccatccccgcccccaggcagttgccccggtgacacatcaagacaagaannnnntagtctttcagcaacacagttacacaaggaacagaacagaacagtctctcccgcccagccntgcggcacaagggatngacacgcgttccccaaatccgatgtttctgctttgtcgtgnnnngcccttcctgactctcctccgaacccagtgaggggctggtggctcccccggcatgaccccctcaaaaacgaaggggagatgttgcaagagccatgggagcgccagatggcaaggcttctttggcagtctgagaaccccaggtccccnagggcctgggggtgctgggcgggcaggagcgggctgagggtgggggccacttgggtgtttgagcattgcctttgattgctgggcagacaatacattgtttcctgtgtcttctggggagacagatttgggaaggagtggaggggaggccnaaggggggtgtggagaaaggagcagaaagggcagcattggggtttcataanccaacgggcagaaagggacttacccccgcatgggtcttnnnnnnnntnnnnnnnnnttccttttttaaaaagttatttatttattctttttttttttttttttttttttggtaaggnttgaatgcacttttggtttttggtcatgttcggttggtcaaagataaaaactaagtttgagagatgaatgcaaaggaaaaaaatattttccaaagtccatgtgaaattgtctcccattttttggcttttgagggggttcagtttgggttgcttgtctgtttccgggttggggggaaagttggttgggtgggagggagccaggttgggatggagggagtttacaggaagcagacagggccaacgtcgaagccgaattcctggtctggggcaccaacgtccaagggggccacatcgatgatgggcaggcgggaggtcttggtggttttgtattcaatcactgtcttgccccaggctccggtgtgactcgtgcagccatcgacagtgacgctgtaggtgaagcggctgttgccctcggcgcggatctcgatctcgttggagccctggaggagcagggccttcttgaggttgccagtctgctggtccatgtaggccacgctgttcttgcagtggtaggtgatgttctgggaggcctcggtggacatcaggcgcaggaaggtcagctggatggccacatcggcagggtcggagccctggccgccatactcgaactggaatccatcggtcatgctctcgccgaaccagacatgcctcttgtccttggggttcttgctgatgtaccagttcttctgggccacactgggctgagtggggtacacgcaggtctcaccagtctccatgttgcagaagactttgatggcatccaggttgcagccttggttggggtcaatccagtactctccactcttccagtcagagtggcacatcttgaggtcacggcaggtgcgggcggggttcttgcggntnccctctgggctccggatgttctcgatctgctggctcaggctcttgagggtggtgtccacctcgaggtcacggtcacgaaccacattggcatcatcagcccggtagtagcggccaccatcgtgagccttctcttgaggtggctggggnaggaagctgaagtcgaaaccagcgctgggaggaccagggggaccaggaggtccaggagggccggggggaccaacaggaccagcatcaccagtgcgaccgcgaggaccagggggcccaatggggccagggagaccgttgagtccatctttgccaggagcaccagcagagccagggggacctcggggaccagcaggaccagaggctccagagggaccttgttcaccaggagagccaggagggccagggggaccctggaggccagagaagccacggtgaccctttatgcctctgtcgccctgttcgcctgtctcacccttgtcaccacgggggccttggggtccggcggggccacgggcgccnacggggccgacgggaccggcgggaccagcaggaccagtctcaccacgatcaccactcttgccagcagggccaacggggccaggggcaccaggagcaccaggagcaccagggggtccagcggggccggtctcaccacggtcacccttggcgccaggagaaccgtctcgtccaggggaaccttcggcagcaggagccccctcacgtccagattcaccagggggtccagccaatccaggggggcccatgggaccggggggaccacgttcaccacttgctccagagggaccttgtttgccaggttcaccagaggggccaggaagaccagggaagcctctctctcctctctgaccaggcaggccgaccacaccacgctgtccagcaataccttgaggcccgggagtaccaggagcaccagcaggaccatcagcaccaggggatcctttctcgccagcagggccagggggaccagggggaccaacttcaccaggacgtccagcagggccagtctcaccacggggacctttgccgccttctttgccagcaggaccaggagggccagggggtccagcatttccagaggggccaggaggaccgactcggccagcagcaccagggaaaccagtagcaccagggggaccagcgctgccgcgagcacctttggctccaggagcaccaacattaccaatggggccagggggtccagcgggtccggcaggcccagggggaccagcatcgcctttggcaccagcatcaccaggttcgcctttagcaccaggttggccgtcagcaccaggggggccagcaaagccagcagggccggggggaccaggctcaccacggtctccgggggcaccacgagctccagtgggaccagcagggccgctgggaccactttcacccttgtcaccaggggcaccagcagggccaggaggaccaatggggccggtcagaccacggacgccatctttgccaggagagccatcagcacctttgggaccagcatcacctctgtcacccttaggccctggaagaccagctgcaccacgttcaccaggcattccctgaaggccaggggcgccctggctaccgggagctccaggggcaccagcatcacccttagcaccatcgttgccgggagcaccgttggcccctcggggtccagcaggaccagggggaccttgcacaccacgctcgccagggaaacctctctcgcctcttgctccagaggggccaggggcgccaaggtctccaggaacaccctgttcaccaggtttgcctgcttcacctggaggaccagcaggaccagggagaccctggaatccgggggagccagcagggccttgttcacctctctcgccagcgggaccagcagggccagggggtccctgagctccagcctctccatctttgccagcaggaccgacagcgccagggggtccgggaacacctcgctctccagccttgccgggctctccagcagcacctttaggtccagggaatcccatcacaccagcctgaccacgggcaccaggtgggcctgggggtccggggcgaccatcttgaccggcgggaccaggggggccagttttgccatcaggaccagggctgccagggcttccagtcagacccttggcaccaggcagaccagcttcaccgggacgaccagcttcaccaggagatcctttggggccagcggggccaggagaaccacgttcaccagcgggacccttgggaccagcaacaccatctgcgccagggaaaccacggctaccaggtccaccacgctcgccagggggtccgggcaggccagtgggtccgggttcacctcgagctcctcgctttccttcctctccagcagggccagggggtccttgaacaccaacagggccaggctctcccttagcaccagtgtctcctttgctgccaggagcaccaggttcaccgctgttacccttgggaccaggagggccgccggggccctggggtccagaggggcctcgggcaccagggaagccaggagcaccagcaataccaggagcaccattggcacctttagcaccaggctgtccatcagcaccagggtttccagcagggccagcagcaccagcagggccaggggggccaggctcaccacgcacaccctggggaccttcagagcctcggggcccttggggaccagcttcacccttagcaccaacagcaccagggaagccaggaggaccagcggggccggtgggaccagggggcccggcagcaccagtagcaccatcatttccacgagcaccagcagggccaggggctccagggcgacctctctcaccaggcaggccacgggggcccatctgaccaggagctccattttcaccagggctgccaggctcacccttaggaccagcaggaccagcatctcccttggcaccatccaaaccactgaaacctctgtgtcccttcattccagggaggccagctgttccgggcaatcctcgagcaccctgaggcccaggaggcccacgctcaccaggacgaccaggttttccagcttccccatcatctccattctttccagggggacctgggggacctcggggacccatgggacctgaagctccaggctcgccaggctcaccagggggaccttggaagccttggggaccaggtgcaccaggggggccagggagaccacgaggaccagagggacccatggggccaggcacggaaattcctccggttgatttctcatcatagccataagacagctggggagcaaagtttcctccgaggccagggggtccgggaggtccggggggtccggggggtccgggaagtccaggctgtccagggatgccatctcggccaggggggcctgcgggtccccttgggcctcgggggccagtgtctcccttgggtccctcgacgccggtggtttcttggtcggtgggtgactctgagccgtcggggcagacgggacagcactcgccctcggggacttcggcgccggggcagttcttggtctcgtcacagatcacgtcatcgcacaacaccttgccgttgtcgcagacgcagatccggcagggctcgggtttccacacgtctcggtcatggtacctgaggccgttctgtacgcaggtgattggtgggatgtcttcgtcttggccctcgacttggccttcctcttggccgtgcgtcaggagggcggtggccgctaagaggagcaggagccggaggtccacaaagctgaacatgtctagaccctagacatgtagactctttgtggctggggagggggttagcgtccgctcatgcgtggcctcacactccgcgtgcctcctgctccgaccccgaggagaaactcccgtctgct

SEQ ID NO: 106 - DNA, 6741 bp, Homo sapiens; identical to SEQ ID NO: 105
  modified_base (758)..(758): a, c, g, or t
  modified_base (760)..(760): a, c, g, or t
  modified_base (762)..(766): a, c, g, or t
  modified_base (768)..(775): a, c, g, or t
  modified_base (777)..(782): a, c, g, or t
  modified_base (810)..(810): a, c, g, or t
  modified_base (812)..(812): a, c, g, or t
  modified_base (928)..(928): a, c, g, or t
  modified_base (1203)..(1203): a, c, g, or t
  modified_base (1207)..(1207): a, c, g, or t
  modified_base (1420)..(1424): a, c, g, or t
  modified_base (1485)..(1485): a, c, g, or t
  modified_base (1501)..(1501): a, c, g, or t
  modified_base (1542)..(1545): a, c, g, or t
  modified_base (1692)..(1692): a, c, g, or t
  modified_base (1841)..(1841): a, c, g, or t
  modified_base (1892)..(1892): a, c, g, or t
  modified_base (1931)..(1938): a, c, g, or t
  modified_base (1940)..(1948): a, c, g, or t
  modified_base (2009)..(2009): a, c, g, or t
  modified_base (2871)..(2871): a, c, g, or t
  modified_base (2873)..(2873): a, c, g, or t
  modified_base (3020)..(3020): a, c, g, or t
  modified_base (3380)..(3380): a, c, g, or t

SEQ ID NO: 107 - DNA, 2464 bp, Homo sapiens
cggaaacttgggggagtgcacagaagaacttcgggagcgcacgcgggaccagggaccaggctgagactcggggcgccagtccgggcaggggcagcgggacgcggccggagatgccctgtatccaagcccaatatgggacaccagcaccgagtccgggaccccgtgaccacctggcaagcgaccccctgacccctgagttcatcaagcccaccatggacctggccagccccgaggcagcccccgctgcccccactgccctgcccagcttcagcacgttcatggacggctacacaggagagtttgacaccttcctctaccagctgccaggaacagtccagccatgctcctcagcctcctcctcggcctcctccacatcctcgtcctcagccacctcccctgcctctgcctccttcaagttcgaggacttccaggtgtacggctgctaccccggccccctgagcggcccagtggatgaggccctgtcctccagtggctctgactactatggcagcccctgctcggccccgtcgccctccacgcccagcttccagccgccccagctctctccctgggatggctccttcggccacttctcgcccagccagacttacgaaggcctgcgggcatggacagagcagctgcccaaagcctctgggcccccacagcctccagccttcttttccttcagtcctcccactggccccagccccagcctggcccagagccccctgaagttgttcccctcacaggccacccaccagctgggggagggagagagctattccatgcctacggccttcccaggtttggcacccacttctccacaccttgagggctcggggatactggatacacccgtgacctcaaccaaggcccggagcggggccccaggtccaagtgaaggccgctgtgctgtgtgtggggacaacgcttcatgccagcattatggtgtccgcacatgtgagggctgcaagggcttcttcaagcgcacagtgcagaaaaacgccaagtacatctgcctggctaacaaggactgccctgtggacaagaggcggcgaaaccgctgccagttctgccgcttccagaagtgcctggcggtgggcatggtgaaggaagttgtccgaacagacagcctgaaggggcggcggggccggctaccttcaaaacccaagcagcccccagatgcctcccctgccaatctcctcacttccctggtccttgcacacctggattcagggcccagcactgccaaactggactactccaagttccaggagctggtgctgccccactttgggaaggaagatgctggggatgtacagcagttctacgacctgctctccggttctctggaggtcatccgaaagtgggcggagaagatccctggctttgctgagctgtcaccggctgaccaggacctgttgctggagtcggccttcctggagctcttcatcctccgcctggcgtacaggtctaagccaggcgagggcaagctcatcttctgctcaggcctggtgctacaccggctgcagtgtgcccgtggcttcggggactggattgacagtatcctggccttctcaaggtccctgcacagcttgcttgtcgatgtccctgccttcgcctgcctctctgcccttgtcctcatcaccgaccggcatgggctgcaggagccgcggcgggtggaggagctgcagaaccgcatcgccagctgcctgaaggagcacgtggcagctgtggcgggcgagccccagccagccagctgcctgtcacgtctgttgggcaaactgcccgagctgcggaccctgtgcacccagggcctgcagcgcatcttctacctcaagctggaggacttggtgccccctccacccatcattgacaagatcttcatggacacgctgcccttctgacccctgcctgggaacacgtgtgcacatgcgcactctcatatgccaccccatgtgcctttagtccacggacccccagagcacccccaagcctgggcttgagctgcagaatgactccaccttctcacctgctccaggaggtttgcagggagctcaagcccttggggagggggatgccttcatgggggtgaccccacgatttgtcttatcccccccagcctggccccggcctttatgttttttgtaagataaaccgtttttaacacatagcgccgtgctgtaaataagcccagtgctgctgtaaatacaggaagaaagagcttgaggtgggagcggggctgggaggaagggatgggccccgccttcctgggcagcctttccagcctcctgcctggctctctcttcctaccctccttccacatgtacataaactgtcactctaggaagaagacaaatgacagattctgacatttatatttgtgtattttcctggatttatagtatgtgacttttctgattaatatatttaatatattgaataaaaaatagacatgtagttg

SEQ ID NO: 108 - DNA, 5453 bp, Homo sapiens
  modified_base (498)..(498): a, c, g, or t
  modified_base (549)..(549): a, c, g, or t
  modified_base (552)..(564): a, c, g, or t
  modified_base (566)..(567): a, c, g, or t
  modified_base (569)..(569): a, c, g, or t
  modified_base (581)..(581): a, c, g, or t
  modified_base (686)..(686): a, c, g, or t
  modified_base (1411)..(1411): a, c, g, or t
  modified_base (1414)..(1414): a, c, g, or t
  modified_base (1435)..(1435): a, c, g, or t
  modified_base (1915)..(1915): a, c, g, or t
  modified_base (2753)..(2753): a, c, g, or t
  modified_base (2776)..(2776): a, c, g, or t
  modified_base (2797)..(2797): a, c, g, or t
  modified_base (2812)..(2812): a, c, g, or t
  modified_base (2836)..(2836): a, c, g, or t
  modified_base (2948)..(2948): a, c, g, or t
  modified_base (3472)..(3472): a, c, g, or t
  modified_base (3533)..(3533): a, c, g, or t
  modified_base (3535)..(3535): a, c, g, or t
  modified_base (5047)..(5047): a, c, g, or t
  modified_base (5074)..(5074): a, c, g, or t
  modified_base (5093)..(5093): a, c, g, or t
ttttttttttttttttttttttttttttttttttttttcttttggaaaaccaaacatgctttatttcatttttttcacaatttatttaaacatctcacatatacaaaataggtacaatttaatttttctgcttgcccaagaaacaaagcttctgtggaaccatggaagaagatgaaaatgagactggcaaagaacaaatgctgaatctgaagaagaggacaactttgggcaaataatctgcatacttttaattgggaataagatggaaaatatgaatgctaaatcaaattttttaaaaaatacaccacacgatacaactcaatacaggagtatttcttctcaaattcttctagcaccatcaacattcttcaagtatctgaaatactattaattagcacctttgtattatgaacaaaacaaaacaaggacctcagttcatctctgtctaggtcagcacctaacaatgtggatcacactcatgggaaagtgttttgaggntagtttaaacctttggaagtttgggttttaaacttccctctgtggaagatnttnnnnnnnnnnnnntnntncaaatgtttatnggtttttatttttcaatttttattttggttttcttacaaaggttgacattttccataacaggtgtaagagtgttgaaaaaaaaattcaaatttttgggggagcgngggaaggagttaatgaaactgtattgcacaatgctctgatcaatccttctttttctcttttgcccacaatttaagcaagtagatgtgcagaagaaatggaaggattcagctttcagttaaaaaagaagaagaagaaatggcaaagagaaagttttttcaaatttctttcttttttaatttagattgagttcatttatttgaaacagactgggccaatgtccacaaagaattcctggtcagcaccaccgatgtccaaaggtgcaatatcaaggaagggcaggcgtgatggcttatttgttttgtattcaatgattgtctttccccattcatttgtctttttagagcagccatctacaagaacagtgtaagtgaacctgctgttgccctcagcaacaagttcaacatcattagagccctgtagaatgacagcctttttcaggttgccagtctcctcatccatgtatgcaatgctgttcttgcagtggtaggtgatgttctgagaggcatagttggccagcaggcgcatgaaggcaagttgggtagccatttccttggaagtcactccttctacattatattcaaactggctgccagcattgatagtttctcctagccagacgtgtttcttgtccttggagctcctataccagttcttggctgggatgttttcaggttgggcccggatacaggtttcgccagtagagaaatcacagtatactttgatngcntccatagtgcatccttggttngggtcaatccagtagtaaccactgctccactctgggtggctgagtctcaagtcacggcatgtgcgagctgggttctttctagagccttcaggagtaagaagggtctcaatctggttgttgagagacttcagagtagcatcaacttcatagtccttgggtctgagagaaggtgctgagcgaggctggtcagccctgtagaagtctccatcgtaaccaaagtcataaccaccaccgcttacacctggaggtccaggagggccagggggaccaggggggccagcagggccttggtgaccctgagggcctcgaatgccagcaggtccaaccgtaccaggatgtccagtgcgaccatcttttccagcagggccagaaggaccagcagggcccctaggaccagcaggacccacggagccaggagcaccttgatcaccatggtgaccagcgataccaggcagaccttgcaatccattgtgtcccttnaagccaggaagacctctgggccccttttcaccgggctctcccttatcgccacgaatgccttgtgggccactaggacctcttgggccaacagcaccagcaggaccaacaggaccagaaggaccagtttcaccacggtttccatgtttgccagcaggacccacggggccatgaggaccaggtgcacctgcagcaccaacgggaccaatattgccagggtaaccgcgctctcccttgtgtccgggttgaccatcgcgacctgggggaccatcgttcccagggttgccatcacgaccagcttcaccaggagcaccgttgactccaggactacccacagcaccaggaggaccacgggccccaggagggccggcaatgccaagaggaccaggttcacccacagcaccagcaacaccaggtagaccacgttcacctctcgagccagggagacccagaataccaggagcaccaagaagaccctgaggacctggagtgccaggaggtccagcagtaccagcctctccagagggacccttctcaccagcgaagccagggggaccaactgcacctacttctccagttcggccaactggaccttggtcaccacgaggaccacgaagcccttctttcccagcaggaccagggggaccaggagggccagaaataccagagggtcctgggggaccagtccgtccagcagcaccagggaaaccagtcataccaggggggcctccatcaccacgacttccagcaggaccggggggaccatttggaccagctgggccagcagctccaacggggcctgtgggaccaacaacaccgttttcacccttaggccctttgnctcctctttctcctttagcaccnggttgaccagcagcaccagcnggaccagcaaatccnttggggccagcaggaccgacctcnccacgttcaccagggcttccccgaggaccagcaggaccagcaggaccagcagccccagcttcgccccggtcacctgtggctccagcaggaccaggggcacctacagcaccangagcaccacgagcaccatctctgccagggttaccaatttcacctctgagaccaggttcacccttttctcccttgcctccaggtatgccagcagcacccctctctcctgggagtccactaggaccagatggaccagcagtgcccacagcaccaaccacaccaggttcacccttgtttccatcaggccctgggggtccagaaggacctcggcttccaataggaccagtaggaccggcagcaccactctcacctgggggaccgcgttcccctcttggaccagcaggaccagggagaccaaactcaccatggagacccctttctcctggtttgccaacttcaccagcgggacctgaggggccaggcagaccctggaagcctggaggaccagcgggaccctgttcaccttttccaccttgaacaccctgtggtccaggaggtccctgagcaccattgtttccatcaggacctggagcaccccgagcaccagcaagaccagcatgacctttatcaccgtttttgccaggntcaccagtggggcctttgggtccagggaatccaatgttgccaggctctcctcttgctccancngggccaattgggccaggcctgccgtcgatgccagggaggccgacaggaccttcttttccagcggggccgatatttccaggggaaccaggaagacctctgggtcccatgagaccaggctccccagggcgaccagcatctccattaggtcctcggactccagcagggccacttgcaccacgactaccaggagggcccatgacgccagctctgccatcagctccaggaagaccacgagaaccaggactacctctcagcccaggaggtcctggagggccggcagatccagcttccccattagggcctctctttccttcttcaccactgggaccaggaggaccttggggcccagcagagccgggctcacccttgttaccgctctctcctttggagccagctggaccaggctcaccaacaagtcctctggcaccagtagcaccggcagcaccaacagggccaggaataccgcggggtccagggaggccgggagccccagcaacgccgggaaggccagcagcacccttggcaccagtaaggccgtttgctccaggattaccaggaggtccaacggggccggagaggcctggaagacccacttcaccacggggaccggcgggaccagcaggaccagcgttaccaacagctccaatttcacccttggggccaggggcacctgggaagcctggagggccagcagacccaatgggaccagcaggacccacgggacccacacttccatcactgccacgggcaccagctgggccaggggcaccaacacgtcctctctcaccaggaagcccacgggctcctgtttgacctggagttccattttcaccaggggcaccaggttcacccttcacaccaggagcaccgggctgtcccttcaatccatccagaccattgtgtcccctaatgcctttgaagccaggaagtccaggagttccagggaaaccacgagcaccctgtggtccaacaactcctctctcaccaggtcgtccgggttttccagggtgaccatcttcaccagccttgccaggagggccagctggaccacgagcacctgcaggaccagtttgaccaggttcaccaggctcaccagcaggtccttggaaaccttgagggcctggggctccagctgcaccaggtgggcctctaggtcccattaagcccattggtccagggccaagtccaactccttttccatcatactgagcagcaaagttcccaccgagaccaggggggccaggaggaccaggtggaccaggagggcctgtgggaccatcttcaccatctctgcctggggggcctggtggacccctttctccacgtggtcctctatctccggctgggccctttcttacagtttcctcttgtaaagattggcatgttgctaggcataaggttactgcaagcagcaacaaagtccgcgtatccacaaagctgagcatgtctagcacttagacatgcagactccttgtgtcgcagagcccctgggtcaccggcggaggtatcacntggcgggcgcgggcatgcagtcgtggnccagtacctccaacttagnccgaaacctcctgctgccgtggtgctaaaataacaaatcccggatctgccctatttatacggcaaaagtttccctggccctagggtgcctccaaaagggcctccaccaatgggagggctggggctgggggcccgggcagccacagctgggaggagcctgcgggggcgcagaggagggcccgaatgggggaagggacgtggccacggggctggcttcttaaattggttccattctttttgaggacgtggacacttttgaggctttcaaggggaaactctgactcgttgtctgcatacctccgccctccgcatcctcccgccctcccccgccctttccaagtttggaaacactatgggacac

SEQ ID NO: 109 - DNA, 5086 bp, Homo sapiens
  modified_base (27)..(27): a, c, g, or t
  modified_base (46)..(46): a, c, g, or t
agcaccacggcagcaggaggtttcggnctaagttggaggtactggnccacgactgcatgcccgcgcccgccaggtgatacctccgccggtgacccaggggctctgcgacacaaggagtctgcatgtctaagtgctagacatgctcagctttgtggatacgcggactttgttgctgcttgcagtaaccttatgcctagcaacatgccaatctttacaagaggaaactgtaagaaagggcccagccggagatagaggaccacgtggagaaaggggtccaccaggccccccaggcagagatggtgaagatggtcccacaggccctcctggtccacctggtcctcctggcccccctggtctcggtgggaactttgctgctcagtatgatggaaaaggagttggacttggccctggaccaatgggcttaatgggacctagaggcccacctggtgcagctggagccccaggccctcaaggtttccaaggacctgctggtgagcctggtgaacctggtcaaactggtcctgcaggtgctcgtggtccagctggccctcctggcaaggctggtgaagatggtcaccctggaaaacccggacgacctggtgagagaggagttgttggaccacagggtgctcgtggtttccctggaactcctggacttcctggcttcaaaggcattaggggacacaatggtctggatggattgaagggacagcccggtgctcctggtgtgaagggtgaacctggtgcccctggtgaaaatggaactccaggtcaaacaggagcccgtgggcttcctggtgagagaggacgtgttggtgcccctggcccagctggtgcccgtggcagtgatggaagtgtgggtcccgtgggtcctgctggtcccattgggtctgctggccctccaggcttcccaggtgcccctggccccaagggtgaaattggagctgttggtaacgctggtcctgctggtcccgccggtccccgtggtgaagtgggtcttccaggcctctccggccccgttggacctcctggtaatcctggagcaaacggccttactggtgccaagggtgctgctggccttcccggcgttgctggggctcccggcctccctggaccccgcggtattcctggccctgttggtgctgccggtgctactggtgccagaggacttgttggtgagcctggtccagctggctccaaaggagagagcggtaacaagggtgagcccggctctgctgggccccaaggtcctcctggtcccagtggtgaagaaggaaagagaggccctaatggggaagctggatctgccggccctccaggacctcctgggctgagaggtagtcctggttctcgtggtcttcctggagctgatggcagagctggcgtcatgggccctcctggtagtcgtggtgcaagtggccctgctggagtccgaggacctaatggagatgctggtcgccctggggagcctggtctcatgggacccagaggtcttcctggttcccctggaaatatcggccccgctggaaaagaaggtcctgtcggcctccctggcatcgacggcaggcctggcccaattggcccagctggagcaagaggagagcctggcaacattggattccctggacccaaaggccccactggtgatcctggcaaaaacggtgataaaggtcatgctggtcttgctggtgctcggggtgctccaggtcctgatggaaacaatggtgctcagggacctcctggaccacagggtgttcaaggtggaaaaggtgaacagggtcccgctggtcctccaggcttccagggtctgcctggcccctcaggtcccgctggtgaagttggcaaaccaggagaaaggggtctccatggtgagtttggtctccctggtcctgctggtccaagaggggaacgcggtcccccaggtgagagtggtgctgccggtcctactggtcctattggaagccgaggtccttctggacccccagggcctgatggaaacaagggtgaacctggtgtggttggtgctgtgggcactgctggtccatctggtcctagtggactcccaggagagaggggtgctgctggcatacctggaggcaagggagaaaagggtgaacctggtctcagaggtgaaattggtaaccctggcagagatggtgctcgtggtgctcatggtgctgtaggtgcccctggtcctgctggagccacaggtgaccggggcgaagctggggctgctggtcctgctggtcctgctggtcctcggggaagccctggtgaacgtggcgaggtcggtcctgctggccccaacggatttgctggtccggctggtgctgctggtcaaccgggtgctaaaggagaaagaggagccaaagggcctaagggtgaaaacggtgttgttggtcccacaggccccgttggagctgctggcccagctggtccaaatggtccccccggtcctgctggaagtcgtggtgatggaggcccccctggtatgactggtttccctggtgctgctggacggactggtcccccaggaccctctggtatttctggccctcctggtccccctggtcctgctgggaaagaagggcttcgtggtcctcgtggtgaccaaggtccagttggccgaactggagaagtaggtgcagttggtccccctggcttcgctggtgagaagggtccctctggagaggctggtactgctggacctcctggcactccaggtcctcagggtcttcttggtgctcctggtattctgggtctccctggctcgagaggtgaacgtggtctacctggtgttgctggtgctgtgggtgaacctggtcctcttggcattgccggccctcctggggcccgtggtcctcctggtgctgtgggtagtcctggagtcaacggtgctcctggtgaagctggtcgtgatggcaaccctgggaacgatggtcccccaggtcgcgatggtcaacccggacacaagggagagcgcggttaccctggcaatattggtcccgttggtgctgcaggtgcacctggtcctcatggccccgtgggtcctgctggcaaacatggaaaccgtggtgaaactggtccttctggtcctgttggtcctgctggtgctgttggcccaagaggtcctagtggcccacaaggcattcgtggcgataagggagagcccggtgaaaaggggcccagaggtcttcctggcttaaagggacacaatggattgcaaggtctgcctggtatcgctggtcaccatggtgatcaaggtgctcctggctccgtgggtcctgctggtcctaggggccctgctggtccttctggccctgctggaaaagatggtcgcactggacatcctggtacggttggacctgctggcattcgaggccctcagggtcaccaaggccctgctggcccccctggtccccctggccctcctggacctccaggtgtaagcggtggtggttatgactttggttacgatggagacttctacagggctgaccagcctcgctcagcaccttctctcagacccaaggactatgaagttgatgctactctgaagtctctcaacaaccagattgagacccttcttactcctgaaggctctagaaagaacccagctcgcacatgccgtgacttgagactcagccacccagagtggagcagtggttactactggattgaccctaaccaaggatgcactatggatgctatcaaagtatactgtgatttctctactggcgaaacctgtatccgggcccaacctgaaaacatcccagccaagaactggtataggagctccaaggacaagaaacacgtctggctaggagaaactatcaatgctggcagccagtttgaatataatgtagaaggagtgacttccaaggaaatggctacccaacttgccttcatgcgcctgctggccaactatgcctctcagaacatcacctaccactgcaagaacagcattgcatacatggatgaggagactggcaacctgaaaaaggctgtcattctacagggctctaatgatgttgaacttgttgctgagggcaacagcaggttcacttacactgttcttgtagatggctgctctaaaaagacaaatgaatggggaaagacaatcattgaatacaaaacaaataagccatcacgcctgcccttccttgatattgcacctttggacatcggtggtgctgaccatgaattctttgtggacattggcccagtctgtttcaaataaatgaactcaatctaaattaaaaaagaaagaaatttgaaaaaactttctctttgccatttcttcttcttcttttttaactgaaagctgaatccttccatttcttctgcacatctacttgcttaaattgtgggcaaaagagaaaaagaaggattgatcagagcattgtgcaatacagtttcattaactccttcccccgctcccccaaaaatttgaatttttttttcaacactcttacacctgttatggaaaatgtcaacctttgtaagaaaaccaaaataaaaattgaaaaataaaaaccataaacatttgcaccacttgtggcttttgaatatcttccacagagggaagtttaaaacccaaacttccaaaggtttaaactacctcaaaacactttcccatgagtgtgatccacattgttaggtgctgacctagacagagatgaactgaggtccttgttttgttttgttcataatacaaaggtgctaattaatagtatttcagatacttgaagaatgttgatggtgctagaagaatttgagaagaaatactcctgtattgagttgtatcgtgtggtgtattttttaaaaaatttgatttagcattcatattttccatcttattcccaattaaaagtatgcagattatttgcccaaagttgtcctcttcttcagattcagcatttgttctttgccagtctcattttcatcttcttccatggttccacagaagctttgtttcttgggcaagcagaaaaattaaattgtacctattttgtatatgtgagatgtttaaataaattgtgaaaaaaatgaaataaagcatgtttggttttccaaaagaacatat

SEQ ID NO: 110 - DNA, 4322 bp, Homo sapiens
gggaccgacgacacgcccccctctcctcctttgttccgggggtcggcggccgctctcctgccagagctcgggatctcggccccgggaggcgggcgctcgggcgcagccgcgaagatgccgttggaactgacgcagagccgagtgcagaagatctgggtgcccgtggaccacaggccctcgttgcccagatcctgtgggccaaagctgaccaactcccccaccgtcatcgtcatggtgggcctccccgcccggggcaagacctacatctccaagaagctgactcgctacctcaactggattggcgtccccacaaaagtgttcaacgtcggggagtatcgccgggaggctgtgaagcagtacagctcctacaacttcttccgccccgacaatgaggaagccatgaaagtccggaagcaatgtgccttagctgccttgagagatgtcaaaagctacctggcgaaagaagggggacaaattgcggttttcgatgccaccaatactactagagagaggagacacatgatccttcattttgccaaagaaaatgactttaaagcgtttttcatcgagtcggtgtgcgacgaccctacagttgtggcctccaatatcatggaagttaaaatctccagcccggattacaaagactgcaactcggcagaagccatggacgacttcatgaagaggatcagttgctatgaagccagctaccagcccctcgaccccgacaaatgcgacagggacttgtcgctgatcaaggtgattgacgtgggccggaggttcctggtgaaccgggtgcaggaccacatccagagccgcatcgtgtactacctgatgaacatccacgtgcagccgcgtaccatctacctgtgccggcacggcgagaacgagcacaacctccagggccgcatcgggggcgactcaggcctgtccagccggggcaagaagtttgccagtgctctgagcaagttcgtggaggagcagaacctgaaggacctgcgcgtgtggaccagccagctgaagagcaccatccagacggccgaggcgctgcggctgccctacgagcagtggaaggcgctcaatgagatcgacgcgggcgtctgtgaggagctgacctacgaggagatcagggacacctaccctgaggagtatgcgctgcgggagcaggacaagtactattaccgctaccccaccggggagtcctaccaggacctggtccagcgcttggagccagtgatcatggagctggagcggcaggagaatgtgctggtcatctgccaccaggccgtcctgcgctgcctgcttgcctacttcctggataagagtgcagaggagatgccctacctgaaatgccctcttcacaccgtcctgaaactgacgcctgtcgcttatggctgccgtgtggaatccatctacctgaacgtggagtccgtctgcacacaccgggagaggtcagaggatgcaaagaagggacctaacccgctcatgagacgcaatagtgtcaccccgctagccagccccgaacccaccaaaaagcctcgcatcaacagctttgaggagcatgtggcctccacctcggccgccctgcccagctgcctgcccccggaggtgcccacgcagctgcctggacaaaacatgaaaggctcccggagcagcgctgactcctccaggaaacactgaggcagacgtgtcggttccattccatttccatttctgcagcttagcttgtgtcctgccctccgcccgaggcaaaacgtatcctgaggacttcttccggagagggtggggtggagcagcgggggagccttggccgaagagaaccatgcttggcaccgtctgtgtcccctcggccgctggacaccagaaagccacgtgggtccctggcgcctgcctttagcctgggggcccccacctccactctctgggttcctaggaatgtccagcctcggagaccttcacaaagccttgggagggtgatgagtgctggtcctgacaagaggccgctggggacactgtccgttttgtttcgtttctgtgatctcccggcacgtttggagctgggaagaccacactggtggcagaatcctaaaattaaaggaggcagcctcctagttgctgaaagttaaggaatgtgtaaaacctccacgtgactgtttggtgcatcttgacctgggaagacgcctcatgggaacgaacttggacaggtgttgggttgacccctcttctgcaggaagtccctgagctgagacgcaaagttggctgggtggtggtcggcaccctggctcctgcaggtccacacaccttccaggcctgtggcctgcctccaaagatgtgcaagggcaggctggctgcacggggagagggaagtattttgccgaaatatgagaactggggcctcctgctcccagggagctccagggcccctctctcctcccacctggacttggggggaactgagaaacactttcctggagctgctggcttttgcacttttttgatggcagaagtgtgacctgagagtcccaccttctcttcaggaacgtagatgtcggggtgtcttgccctggggggcttggaacctctgaaggtggggagcggaacacctggcatccttccccagcacttgcattacggtccctgctcttccaaggtggggacagtggcccaagcaaggcctcacacgcagccacttcttcaagagctgcctgcacactgtcttggagcatctgccttgtgcctggcactctgccggtgccttgggaaggtcggtaagagtggactttgtcctgggcttcccttcatggcgtctagacacttttgtggtgatggaaagcatgggacctgtcgtctcagcctgttggtttctcctcattgcctcaaaccctggggtaggtggaacggggggtctcgtgcccagatgaaaccatttggaaactcggcagcagagtttgtccaaatgacccttttcaggatgtctcaaagcttgtgccaaaggtcacttttctttcctgccttctgctgtgagccctgagatcctcctcccagctcaagggacaggtcctgggtgagggtgggagatttagacacctgaaactgggcgtggagagaagagccgttgctgtttgttttttgggaagagcttttaaagaatgcatatttttttacctggttggaattgagtaggaactgaggctgtgcttcaggtatggtacaatcaagtgggggattttcatgctgaacccattcaaagccctccccgtccccgcatttccaggccaccctttggctggcgtctgctggagaggatgtctctgtcgcattcccgtgcagctcagctcgcgcaggttttctctctctccctggatgttgagctctcatcagaatatgtgggtggggggtggacgtgcacgggtgcatgattgtgcttaacttggttgtatttttcgatttgacatggaagcctgttgctttgctctagagaatagtttctcgtgtccccttcgcacgcctcattctttgaacctcatctctgatgtttgatacagatgggggcttgatagctgtggtcccctttcccttctgactacgtgaaaatcaatacctaaatacagaagccttggtctaaacaccgagacttttagtttgcgaaggggcttagatagggagagaggtaacatgaatctggacaggggagggagatactatagaaaggagaacactgcatactttgcaaagccagtgacctccttttgaaggggacattggacgggggccgggggcgggggttcggtttgactaccgtcatgaacttttggcgtatactgattcctccaactctccaccccacaaaataacggggaccaatatttttaactttgcctatttgtttttgggtgagtttcccccctccattattctgtcctgagaccacgggcaaagctcttccattttgagagagaagaaaaactgtttggaaccacaccaatgatatttttctttgtaatacttgaaatttatttttttattattttgatagcagatgtgctatttatttatttaatatatgtataaggagtcctaaacaatagaaagctgtagaagctgtagagataggcttcagttgttaattggtttggagcctcctatgtgtgacttatgactctctgtgttctgtgtatttgtctgaattaatgacctgggatataaagctatgctagctttcaaacaggagatgccttcagaaagctttgtatattttgcagttgccagaccaataaaatacctggttgaaatacatggacgaaaaaaaaaaaaaaaaaaaaaaa

SEQ ID NO: 111 - DNA, 1401 bp, Homo sapiens
cgtattgctcggcccggggagtttcgccccctgcccggctccgcggcgcggaggatggcgtggaaacggctgggcgcgctggtgatgttccctctacagatgatctatctggtggtgaaagcagccgtcggactggtgctgcccgccaagctgcgggacctgtcgcgggagaacgtcctcatcaccggcggcgggagaggcatcgggcgtcagctcgcccgcgagttcgcggagcgcggcgccagaaagattgttctctggggccggactgagaaatgcctgaaggagacgacggaggagatccggcagatgggcactgagtgccattacttcatctgtgatgtgggcaaccgggaggaggtgtaccagacggccaaggccgtccgggagaaggtgggtgacatcaccatcctggtgaacaatgccgccgtggtccatgggaagagcctaatggacagtgatgatgatgccctcctcaagtcccaacacatcaacaccctgggccagttctggaccaccaaggccttcctgccgcgtatgctggagctgcagaatggccacatcgtgtgcctcaactccgtgctggcactgtctgccatccccggtgccatcgactactgcacatccaaagcgtcagccttcgccttcatggagagcctgaccctggggctgctggactgtccgggagtcagcgccaccacagtgctgcccttccacaccagcaccgagatgttccagggcatgagagtcaggtttcccaacctctttcccccactgaagccggagacggtggcccggaggacagtggaagctgtgcagctcaaccaggccctcctcctcctcccatggacaatgcatgccctcgttatcttgaaaagcatacttccacaggctgcactcgaggagatccacaaattctcaggaacctacacctgcatgaacactttcaaagggcggacatagagacaggatgaagacatgcttgaggagccacggagtttgggggccacagcacctgggcacacacccgagcacctgtccattggcatgcttctgctgggtgagcaggacagctcctgtccccagcgaagaatccggctgcccctgggccagtcccaggacctttgcacaggactgatgggtgtaactgacccccacagggaggcaggaaaacagccagaagccaccttgacacttttgaacatttccagttctgtagagtttattgtcaattgcttctcaagtctaaccagcctcagcagtgtgcatagaccatttccaggagggtctgtccccagatgctctgcctcccgttccaaaacccactcatcctcagcttgcacaaactggttgaacggcaggaatgaaaaataaagagagatggcttttgtgaaaaaaaaa

SEQ ID NO: 112 - DNA, 884 bp, Homo sapiens
cgaggttcgggtcgtggggcggagggaagagcgggcgggcgggaggcgccggcgccagacgcggagggaaggagctacgagtagccgccgagaggccgcggagccagcgacgaccgacccagccgagccgccgccgccgccgcgcccccatggcggccgccaaggacactcatgaggaccatgatacttccactgagaatacagacgagtccaaccatgaccctcagtttgagccaatagtttctcttcctgagcaagaaattaaaacactggaagaagatgaagaggaactttttaaaatgcgggcaaaactgttccgatttgcctctgagaacgatctcccagaatggaaggagcgaggcactggtgacgtcaagctcctgaagcacaaggagaaaggggccatccgcctcctcatgcggagggacaagaccctgaagatctgtgccaaccactacatcacgccgatgatggagctgaagcccaacgcaggtagcgaccgtgcctgggtctggaacacccacgctgacttcgccgacgagtgccccaagccagagctgctggccatccgcttcctgaatgctgagaatgcacagaaattcaaaacaaagtttgaagaatgcaggaaagagatcgaagagagagaaaagaaagcaggatcaggcaaaaatgatcatgccgaaaaagtggcggaaaagctagaagctctctcggtgaaggaggagaccaaggaggatgctgaggagaagcaataaatcgtcttattttattttcttttcctctctttcctttcctttttttaaaaaattttaccctgcccctctttttcggtttgtttttattctttcatttttacaagggacgttatataaagaactgaactc

SEQ ID NO: 113 - DNA, 3273 bp, Homo sapiens
  modified_base (23)..(25): a, c, g, or t
  modified_base (28)..(28): a, c, g, or t
  modified_base (36)..(36): a, c, g, or t
  modified_base (38)..(38): a, c, g, or t
  modified_base (40)..(40): a, c, g, or t
  modified_base (1486)..(1486): a, c, g, or t
  modified_base (1546)..(1546): a, c, g, or t
  modified_base (1719)..(1719): a, c, g, or t
  modified_base (1835)..(1835): a, c, g, or t
  modified_base (2081)..(2081): a, c, g, or t
  modified_base (2221)..(2224): a, c, g, or t
  modified_base (2226)..(2241): a, c, g, or t
  modified_base (2300)..(2300): a, c, g, or t
  modified_base (2323)..(2323): a, c, g, or t
  modified_base (2352)..(2352): a, c, g, or t
  modified_base (2442)..(2442): a, c, g, or t
  modified_base (3174)..(3174): a, c, g, or t
  modified_base (3177)..(3177): a, c, g, or t
  modified_base (3179)..(3182): a, c, g, or t
  modified_base (3184)..(3185): a, c, g, or t
  modified_base (3187)..(3187): a, c, g, or t
  modified_base (3189)..(3190): a, c, g, or t
  modified_base (3195)..(3195): a, c, g, or t
  modified_base (3200)..(3200): a, c, g, or t
  modified_base (3202)..(3204): a, c, g, or t
  modified_base (3206)..(3206): a, c, g, or t
  modified_base (3218)..(3218): a, c, g, or t
  modified_base (3221)..(3221): a, c, g, or t
  modified_base (3240)..(3240): a, c, g, or t
  modified_base (3243)..(3243): a, c, g, or t
ggggcacagctgtgtttggctgnnnggncaagagcncngncaagaagacccacacgcccccctccagcagctgaattcctgcagctcagcagccgccgccagagcaggacgaaccgccaatcgcaaggcacctctgagaacttcaggatgcagatgtctccagccctcacctgcctagtcctgggcctggcccttgtctttggtgaagggtctgctgtgcaccatcccccatcctacgtggcccacctggcctcagacttcggggtgagggtgtttcagcaggtggcgcaggcctccaaggaccgcaacgtggttttctcaccctatggggtggcctcggtgttggccatgctccagctgacaacaggaggagaaacccagcagcagattcaagcagctatgggattcaagattgatgacaagggcatggcccccgccctccggcatctgtacaaggagctcatggggccatggaacaaggatgagatcagcaccacagacgcgatcttcgtccagcgggatctgaagctggtccagggcttcatgccccacttcttcaggctgttccggagcacggtcaagcaagtggacttttcagaggtggagagagccagattcatcatcaatgactgggtgaagacacacacaaaaggtatgatcagcaacttgcttgggaaaggagccgtggaccagctgacacggctggtgctggtgaatgccctctacttcaacggccagtggaagactcccttccccgactccagcacccaccgccgcctcttccacaaatcagacggcagcactgtctctgtgcccatgatggctcagaccaacaagttcaactatactgagttcaccacgcccgatggccattactacgacatcctggaactgccctaccacggggacaccctcagcatgttcattgctgccccttatgaaaaagaggtgcctctctctgccctcaccaacattctgagtgcccagctcatcagccactggaaaggcaacatgaccaggctgccccgcctcctggttctgcccaagttctccctggagactgaagtcgacctcaggaagcccctagagaacctgggaatgaccgacatgttcagacagtttcaggctgacttcacgagtctttcagaccaagagcctctccacgtcgcgcaggcgctgcagaaagtgaagatcgaggtgaacgagagtggcacggtggcctcctcatccacagctgtcatagtctcagcccgcatggcccccgaggagatcatcatggacagacccttcctctttgtggtccggcacaaccccacaggaacagtccttttcatgggccaagtgatggaaccctgaccctggggaaagacgccttcatctgggacaaaactggagatgcatcgggaaagaagaaactccgaagaaaagaattttagtgttaatgactctttctgaaggaagagaagacatttgccttttgttaaanagatggtaaaccagatctgtctccaagaccttggcctctccttggaggacctttaggtcnaaactccctagtctccacctgagaccctgggagagaagtttgaagcacaactcccttaaggtctccaaaccagacggtgacgcctgcgggaccatctggggcacctgcttccacccgtctctctgcccactcgggtctgcagacctggttcccactgaggccctttgcagganggaactacggggcttacaggagcttttgtgtgcctggtagaaactatttctgttccagtcacattgccatcactcttgtactgcctgccaccgcggaggaggctggtgacaggccnaaaggccagtggaagaaacaccctttcatctcagagtccactgtggcactggccacccctccccagtacaggggtgctgcaggtggcagagtgaatgtcccccatcatgtggcccaactctcctggcctggccatctccctccccagaaacagtgtgcatgggttattttggagtgtaggtgacttgtttactcattgaagcagatttctgcttccttttatttttataggaatagaggaagaaangtcagatgcgtgcccagctcttcaccccccaatctcttggtggggaggggtgtacctaaatatttatcatatccttgcccttgagtgcttgttagagagaaagagaactactaaggaaaataatattatttaaactcgcnnnnannnnnnnnnnnnnnnntgtgtcaccgtatctcaggaagtccagccacttgactggcacacacccctccggacatncagcgtgacggagcccacactgncaccttgtggccgcctgagaccctcgcgncccccgcgccccccgcgcccctctttttccccttgatggaaattgaccatacaatttcatcctccttcaggggatcaaaaggacggagtngggggacagagactcagatgaggacagagtggtttccaatgtgttcaatagatttaggagcagaaatgcaaggggctgcatgacctaccaggacagaactttccccaattacagggtgactcacagccgcattggtgactcacttcaatgtgtcatttccggctgctgtgtgtgagcagtggacacgtgaggggggggtgggtgagagagacaggcagctcggattcaactaccttagataatatttctgaaaacctaccagccagagggtagggcacaaagatggatgtaatgcactttgggaggccaaggcgggaggattgcttgagcccaggagttcaagaccagcctgggcaacataccaagacccccgtctctttaaaaatatatatattttaaatatacttaaatatatatttctaatatctttaaatatatatatatattttaaagaccaatttatgggagaattgcacacagatgtgaaatgaatgtaatctaatagaagcctaatcagcccaccatgttctccactgaaaaatcctctttctttggggtttttctttctttcttttttgattttgcactggacggtgacgtcagccatgtacaggatccacaggggtggtgtcaaatgctattgaaattgtgttgaattgtatgctttttcacttttgataaataaacatgtaaaaatgtttcaaaaaaataataaaataaataaatacgaanaanannnnannanannaaaanaaaanannnanaaaaaaaaaaanaanaaaaaaaaaaaaaaaaaanaanacaaaacaaaaaaaaaaaaaaaaaaaaaaa

SEQ ID NO: 114 - DNA, 2876 bp, Homo sapiens
gaattcctgcagctcagcagccgccgccagagcaggacgaaccgccaatcgcaaggcacctctgagaacttcaggatgcagatgtctccagccctcacctgcctagtcctgggcctggcccttgtctttggtgaagggtctgctgtgcaccatcccccatcctacgtggcccacctggcctcagacttcggggtgagggtgtttcagcaggtggcgcaggcctccaaggaccgcaacgtggttttctcaccctatggggtggcctcggtgttggccatgctccagctgacaacaggaggagaaacccagcagcagattcaagcagctatgggattcaagattgatgacaagggcatggcccccgccctccggcatctgtacaaggagctcatggggccatggaacaaggatgagatcagcaccacagacgcgatcttcgtccagcgggatctgaagctggtccagggcttcatgccccacttcttcaggctgttccggagcacggtcaagcaagtggacttttcagaggtggagagagccagattcatcatcaatgactgggtgaagacacacacaaaaggtatgatcagcaacttgcttgggaaaggagccgtggaccagctgacacggctggtgctggtgaatgccctctacttcaacggccagtggaagactcccttccccgactccagcacccaccgccgcctcttccacaaatcagacggcagcactgtctctgtgcccatgatggctcagaccaacaagttcaactatactgagttcaccacgcccgatggccattactacgacatcctggaactgccctaccacggggacaccctcagcatgttcattgctgccccttatgaaaaagaggtgcctctctctgccctcaccaacattctgagtgcccagctcatcagccactggaaaggcaacatgaccaggctgccccgcctcctggttctgcccaagttctccctggagactgaagtcgacctcaggaagcccctagagaacctgggaatgaccgacatgttcagacagtttcaggctgacttcacgagtctttcagaccaagagcctctccacgtcgcgcaggcgctgcagaaagtgaagatcgaggtgaacgagagtggcacggtggcctcctcatccacagctgtcatagtctcagcccgcatggcccccgaggagatcatcatggacagacccttcctctttgtggtccggcacaaccccacaggaacagtccttttcatgggccaagtgatggaaccctgaccctggggaaagacgccttcatctgggacaaaactggagatgcatcgggaaagaagaaactccgaagaaaagaattttagtgttaatgactctttctgaaggaagagaagacatttgccttttgttaaaagatggtaaaccagatctgtctccaagaccttggcctctccttggaggacctttaggtcaaactccctagtctccacctgagaccctgggagagaagtttgaagcacaactcccttaaggtctccaaaccagacggtgacgcctgcgggaccatctggggcacctgcttccacccgtctctctgcccactcgggtctgcagacctggttcccactgaggccctttgcaggatggaactacggggcttacaggagcttttgtgtgcctggtagaaactatttctgttccagtcacattgccatcactcttgtactgcctgccaccgcggaggaggctggtgacaggccaaaggccagtggaagaaacaccctttcatctcagagtccactgtggcactggccacccctccccagtacaggggtgctgcaggtggcagagtgaatgtcccccatcatgtggcccaactctcctggcctggccatctccctccccagaaacagtgtgcatgggttattttggagtgtaggtgacttgtttactcattgaagcagatttctgcttccttttatttttataggaatagaggaagaaatgtcagatgcgtgcccagctcttcaccccccaatctcttggtggggaggggtgtacctaaatatttatcatatccttgcccttgagtgcttgttagagagaaagagaactactaaggaaaataatattatttaaactcgctcctagtgtttctttgtggtctgtgtcaccgtatctcaggaagtccagccacttgactggcacacacccctccggacatccagcgtgacggagcccacactgccaccttgtggccgcctgagaccctcgcgccccccgcgccccccgcgcccctctttttccccttgatggaaattgaccatacaatttcatcctccttcaggggatcaaaaggacggagtggggggacagagactcagatgaggacagagtggtttccaatgtgttcaatagatttaggagcagaaatgcaaggggctgcatgacctaccaggacagaactttccccaattacagggtgactcacagccgcattggtgactcacttcaatgtgtcatttccggctgctgtgtgtgagcagtggacacgtgaggggggggtgggtgagagagacaggcagctcggattcaactaccttagataatatttctgaaaacctaccagccagagggtagggcacaaagatggatgtaatgcactttgggaggccaaggcgggaggattgcttgagcccaggagttcaagaccagcctgggcaacataccaagacccccgtctctttaaaaatatatatattttaaatatacttaaatatatatttctaatatctttaaatatatatatatattttaaagaccaatttatgggagaattgcacacagatgtgaaatgaatgtaatctaatagaagc

SEQ ID NO: 115 - DNA, 4426 bp, Homo sapiens
tgccttgaccaggacttgggactttgcgaaaggatcgcggggcccggagaggtgttggagagcacaatggctgaacaagtccttcctcaggctttgtatttgagcaatatgcggaaagctgtgaagatacgggagagaactccagaagacatttttaaacctactaatgggatcattcatcattttaaaaccatgcaccgatacacactggaaatgttcagaacttgccagttttgtcctcagtttcgggagatcatccacaaagccctcatcgacagaaacatccaggccaccctggaaagccagaagaaactcaactggtgtcgagaagtccggaagcttgtggcgctgaaaacgaacggtgacggcaattgcctcatgcatgccacttctcagtacatgtggggcgttcaggacacagacttggtactgaggaaggcgctgttcagcacgctcaaggaaacagacacacgcaactttaaattccgctggcaactggagtctctcaaatctcaggaatttgttgaaacggggctttgctatgatactcggaactggaatgatgaatgggacaatcttatcaaaatggcttccacagacacacccatggcccgaagtggacttcagtacaactcactggaagaaatacacatatttgtcctttgcaacatcctcagaaggccaatcattgtcatttcagacaaaatgctaagaagtttggaatcaggttccaatttcgcccctttgaaagtgggtggaatttacttgcctctccactggcctgcccaggaatgctacagataccccattgttctcggctatgacagccatcattttgtacccttggtgaccctgaaggacagtgggcctgaaatccgagctgttccacttgttaacagagaccggggaagatttgaagacttaaaagttcactttttgacagatcctgaaaatgagatgaaggagaagctcttaaaagagtacttaatggtgatagaaatccccgtccaaggctgggaccatggcacaactcatctcatcaatgccgcaaagttggatgaagctaacttaccaaaagaaatcaatctggtagatgattactttgaacttgttcagcatgagtacaagaaatggcaggaaaacagcgagcaggggaggagagaggggcacgcccagaatcccatggaaccttccgtgccccagctttctctcatggatgtaaaatgtgaaacgcccaactgccccttcttcatgtctgtgaacacccagcctttatgccatgagtgctcagagaggcggcaaaagaatcaaaacaaactcccaaagctgaactccaagccgggccctgaggggctccctggcatggcgctcggggcctctcggggagaagcctatgagcccttggcgtggaaccctgaggagtccactggggggcctcattcggccccaccgacagcacccagcccttttctgttcagtgagaccactgccatgaagtgcaggagccccggctgccccttcacactgaatgtgcagcacaacggattttgtgaacgttgccacaacgcccggcaacttcacgccagccacgccccagaccacacaaggcacttggatcccgggaagtgccaagcctgcctccaggatgttaccaggacatttaatgggatctgcagtacttgcttcaaaaggactacagcagaggcctcctccagcctcagcaccagcctccctccttcctgtcaccagcgttccaagtcagatccctcgcggctcgtccggagcccctccccgcattcttgccacagagctggaaacgacgcccctgctggctgcctgtctcaagctgcacggactcctggggacaggacggggacgagcaagtgcagaaaagccggctgcgtgtattttgggactccagaaaacaagggcttttgcacactgtgtttcatcgagtacagagaaaacaaacattttgctgctgcctcagggaaagtcagtcccacagcgtccaggttccagaacaccattccgtgcctggggagggaatgcggcacccttggaagcaccatgtttgaaggatactgccagaagtgtttcattgaagctcagaatcagagatttcatgaggccaaaaggacagaagagcaactgagatcgagccagcgcagagatgtgcctcgaaccacacaaagcacctcaaggcccaagtgcgcccgggcctcctgcaagaacatcctggcctgccgcagcgaggagctctgcatggagtgtcagcatcccaaccagaggatgggccctggggcccaccggggtgagcctgcccccgaagacccccccaagcagcgttgccgggcccccgcctgtgatcattttggcaatgccaagtgcaacggctactgcaacgaatgctttcagttcaagcagatgtatggctaaccggaaacaggtgggtcacctcctgcaagaagtggggcctcgagctgtcagtcatcatggtgctatcctctgaacccctcagctgccactgcaacagtgggcttaagggtgtctgagcaggagaggaaagataagctcttcgtggtgcccacgatgctcaggtttggtaacccgggagtgttcccaggtggccttagaaagcaaagcttgtaactggcaagggatgatgtcagattcagcccaaggttcctcctctcctaccaagcaggaggccaggaacttctttggacttggaaggtgtgcggggactggccgaggcccctgcaccctgcgcatcaggactgcttcatcgtcttggctgagaaagggaaaagacacacaagtcgcgtgggttggagaagccagagccattccacctcccctcccccagcatctctcagagatgtgaagccagatcctcatggcagcgaggccctctgcaagaagctcaaggaagctcagggaaaatggacgtattcagagagtgtttgtagttcatggtttttccctacctgcccggttcctttcctgaggacccggcagaaatgcagaaccatccatggactgtgattctgaggctgctgagactgaacatgttcacattgacagaaaaacaagctgctctttataatatgcaccttttaaaaaattagaatattttactgggaagacgtgtaactctttgggttattactgtctttacttctaaagaagttagcttgaactgaggagtaaaagtgtgtacatatataatatacccttacattatgtatgagggatttttttaaattatattgaaatgctgccctagaagtacaataggaaggctaaataataataacctgttttctggttgttgttggggcatgagcttgtgtatacactgcttgcataaactcaaccagctgcctttttaaagggagctctagtcctttttgtgtaattcactttatttattttattacaaacttcaagattatttaagtgaagatatttcttcagctctggggaaaatgccacagtgttctcctgagagaacatccttgctttgagtcaggctgtgggcaagttcctgaccacagggagtaaattggcctctttgatacacttttgcttgcctccccaggaaagaaggaattgcatccaaggtatacatacatattcatcgatgtttcgtgcttctccttatgaaactccagctatgtaataaaaaactatactctgtgttctgttaatgcctctgagtgtcctacctccttggagatgagatagggaaggagcagggatgagactggcaatggtcacagggaaagatgtggccttttgtgatggttttattttctgttaacactgtgtcctgggggggctgggaagtcccctgcatcccatggtaccctggtattgggacagcaaaagccagtaaccatgagtatgaggaaatctctttctgttgctggcttacagtttctctgtgtgctttgtggttgctgtcatatttgctctagaagaaaaaaaaaaaaggaggggaaatgcattttccccagagataaaggctgccattttgggggtctgtacttatggcctgaaaatatttgtgatccataactctacacagcctttactcatactattaggcacactttccccttagagccccctaagtttttcccagacgaatctttataatttcctttccaaagataccaaataaacttcagtgttttcatctaattctcttaaagttgatatcttaatattttgtgttgatcattatttccattcttaatgtgaaaaaaagtaattatttatacttattataaaaagtatttgaaatttgcacatttaattgtccctaatagaaagccacctattctttgttggatttcttcaagtttttctaaataaatgtaacttttcacaagagtcaacattaaaaaataaattattt

SEQ ID NO: 116 - DNA, 1914 bp, Homo sapiens
gcagccaggcgcgcactgcacagctctcttctctcgccgccgcccgagcgcacccttcagcccgcgcgccggccgtgagtcctcggtgctcgcccgccggccagacaaacagcccgcccgaccccgtcccgaccctggccgccccgagcggagcctggagcaaaatgatgcttcaacacccaggccaggtctctgcctcggaagtgagtgcttctgccatcgtcccctgcctgtcccctcctgggtcactggtgtttgaggattttgctaacctgacgccctttgtcaaggaagagctgaggtttgccatccagaacaagcacctctgccaccggatgtcctctgcgctggaatcagtcactgtcagcgacagacccctcggggtgtccatcacaaaagccgaggtagcccctgaagaagatgaaaggaaaaagaggcgacgagaaagaaataagattgcagctgcaaagtgccgaaacaagaagaaggagaagacggagtgcctgcagaaagagtcggagaagctggaaagtgtgaatgctgaactgaaggctcagattgaggagctcaagaacgagaagcagcatttgatatacatgctcaaccttcatcggcccacgtgtattgtccgggctcagaatgggaggactccagaagatgagagaaacctctttatccaacagataaaagaaggaacattgcagagctaagcagtcgtggtatgggggcgactggggagtcctcattgaatcctcattttatacccaaaaccctgaagccattggagagctgtcttcctgtgtacctctagaatcccagcagcagagaaccatcaaggcgggagggcctgcagtgattcagcaggcccttcccattctgccccagagtgggtcttggaccagggcaagtgcatctttgcctcaactccaggatttaggccttaacacactggccattcttatgttccagatggcccccagctggtgtcctgcccgcctttcatctggattctacaaaaaaccaggatgcccaccgttagattcaggcagcagtgtctgtacctcgggtgggagggatggggccatctccttcaccgtggctaccattgtcactcgtaggggatgtggagtgagaacagcatttagtgaagttgtgcaacggccagggttgtgctttctagcaaatatgctgttatgtccagaaattgtgtgtgcaagaaaactaggcaatgtactcttccgatgtttgtgtcacacaacactgatgtgacttttatatgctttttctcagatctggtttctaagagttttggggggcggggctgtcaccacgtgcagtatctcaagatattcaggtggccagaagagcttgtcagcaagaggaggaacagaattctcccagcgttaacacaaaatccatgggcagcatgatggcaggtcctctgttgcaaactcagttccaaagtcacaggaagaaagcagaaagttcaacttccaaagggttaggactctccactcaatgtcttaggtcaggagttgtgtctaggctggaagagccaaagaaatattccattttcctttccttgtggttgaaaccacagtcagtggagagatgtttggaacacagtcagtggagctggtggtaccaggtttagcattattggatgtcaaaagcattttttttgtcatgtagctgttttaagaaatctggcccagggtgtttgcagctgtgagaagtcactcacactggccacaaggacgctggctactgtctattaaaattctgatgtttctgtgaaattctcagagtgtttaattgtactcaatggtatcattacaattttctgtaagagaaaatattacttatttatcctagtattcctaacctgtcagaataataaatattgtggtaaaa

SEQ ID NO: 117 - DNA, 1975 bp, Homo sapiens
  modified_base (63)..(63): a, c, g, or t
  modified_base (104)..(104): a, c, g, or t
  modified_base (107)..(109): a, c, g, or t
  modified_base (112)..(112): a, c, g, or t
  modified_base (140)..(142): a, c, g, or t
  modified_base (1103)..(1103): a, c, g, or t
  modified_base (1268)..(1270): a, c, g, or t
  modified_base (1286)..(1286): a, c, g, or t
  modified_base (1298)..(1298): a, c, g, or t
  modified_base (1301)..(1301): a, c, g, or t
  modified_base (1342)..(1342): a, c, g, or t
  modified_base (1373)..(1373): a, c, g, or t
  modified_base (1378)..(1378): a, c, g, or t
  modified_base (1386)..(1386): a, c, g, or t
  modified_base (1464)..(1464): a, c, g, or t
  modified_base (1483)..(1483): a, c, g, or t
  modified_base (1486)..(1486): a, c, g, or t
  modified_base (1970)..(1971): a, c, g, or t
  modified_base (1974)..(1974): a, c, g, or t
ccgaacaagatcactcaaggtgaaggataatctactaataccagcactttgaatgaaaatttntttctctgccacaaactgaacatcttttttttttttttttnttnnngtnggggagttgaaacctaattttgtggcgnnnagctatgcagcttgaaatccaagtagcactaaattttattatttcgtatttgtacaataagcttcccaggagacgtgtcaacatttttggtgaagaacttgaaagacttcttaagaagaaatatgaagggcactggtatcctgaaaagccatacaaaggatcggggtttagatgtatacacataggggagaaagtggacccagtgattgaacaagcatccaaagagagtggtttggacattgatgatgttcgtggcaatctgccacaggatcttagtgtttggatcgacccatttgaggtttcttaccaaattggtgaaaagggaccagtgaaggtgctttacgtggatgataataatgaaaatggatgtgagttggataaggagatcaaaaacagctttaacccagaggcccaggtttttatgcccataagtgacccagcctcatcagtgtccagctctccatcgcctccttttggtcactctgctgctgtaagccctaccttcatgccccggtccactcagcctttaacctttaccactgccacttttgctgccaccaagttcggctctaccaaaatgaagaatagtggccgtagcaacaaggttgcacgtacttctcccatcaacctcggcttgaatgtgaatgacctcttgaagcagaaagccatctcttcctcaatgcactctctgtatgggcttggcttgggtagccagcagcagccacagcaacagcagcagccagcccagccgccaccgccaccaccaccaccacagcagcaacaacagcagaaaacctctgctctttctcctaatgccaaggaatttatttttcctaatatgcagggtcaaggtagtagtaccaatggaatgttcccaggtgacagcccccttaacctcagtcctctccagtacagtaatgcctttgatgtgtttgcagcctatggaggcctcaatgagaantcttttgtagatggcttgaattttagcttaaataacatgcagtattctaaccagcaattccagcctgttatggctaactaaaaaaaagaaaatgtatcgtacaagttaaaatgcacgggcccaagggggattttttttttcacctccttgagaattttttttttnnnaagcttatagtaaggnatacattcaagnctnggttaaaaaaataataataaaacatgcatcatttttcattngccaaccaagcacaaagttattttatactgnactgntatatttnaaagtatactctcagatatggcctcttacagtatttaagatatagcaaggacatggctgatttttttttataaaaatnggcactaataagtgggttnatnggtcttttctaattgtataatttaatttagtacaaagtttgtaaaatatcagaggatatatatatattgtttctacgacatggtattgcatttatatctttttactacagtgatctgtgacagcagcagcttcatgttgtattttttttactgaaattgtaaaatatccatcttaaagacatcaactattctaaaaattgtgtacaggatattcctttagtggtggaattaaaatgtacgaatacttgctttttcaaaaaaatgtattttctgttaaaagtttaaagatttttgctatatattatggaagaaaaatgtaatcgtaaatattaattttgtacctatattgtgcaatacttgaaaaaaacggtataaaagtattttgagtcagtgtcttacatgttaagagggactgaaatagtttatattaagtttgtattaaaattctttaaaattaaaaaaaaaaaaaaaaaaaaaaaaaaannaana

SEQ ID NO: 118 - DNA, 1073 bp, Homo sapiens
cggagccagcgtgggaggccgctgccgtcgcgcgccttggtttttctgttccttttttttttttttttttaacttcctgcctatcacacgcagccatcagcccacaaagacatgactaccaacgcgggccccttgcacccatactggcctcagcacctaagactggacaactttgtacctaatgaccgccccacctggcatatactggctggcctcttctctgtcacaggggtcttagtcgtgaccacatggctgttgtcaggtcgtgctgcggttgtcccattggggacttggcggcgactgtccctgtgctggtttgcagtgtgtgggttcattcacctggtgatcgagggctggttcgttctctactacgaagacctgcttggagaccaagccttcttatctcaactctggaaagagtatgccaagggagacagccgatacatcctgggtgacaacttcacagtgtgcatggaaaccatcacagcttgcctgtggggaccactcagcctgtgggtggtgatcgcctttctccgccagcatcccctccgcttcattctacagcttgtggtctctgtgggccagatctatggggatgtgctctacttcctgacagagcaccgcgacggattccagcacggagagctgggccaccctctctacttctggttttactttgtcttcatgaatgccctgtggctggtgctgcctggagtccttgtgcttgatgctgtgaagcacctcactcatgcccagagcacgctggatgccaaggccacaaaagccaagagcaagaagaactgaggagtggtggaccaggctcgaacactggccgaggaggagctctctgcctgccagaagagtctagtcctgctcccacagtttggagggacaaagctaattgatctgtcacactcaggctcatgggcaggcacaagaaggggaataaaggggctgtgtgaaggcactgctgggagccattagaacacagatacaagagaagccaggaggtctatgatggtgacgatttttaaaatcaggaaataaaagatcttgactctaaaaaaaaaaaa

SEQ ID NO: 119 - DNA, 1908 bp, Homo sapiens
  modified_base (58)..(59): a, c, g, or t
  modified_base (61)..(63): a, c, g, or t
  modified_base (563)..(563): a, c, g, or t
  modified_base (648)..(649): a, c, g, or t
  modified_base (1054)..(1054): a, c, g, or t
  modified_base (1711)..(1711): a, c, g, or t
  modified_base (1718)..(1721): a, c, g, or t
agcgcgcgtaatacgactcactatagggcgaattgggtaccgggccccccctcgagtnntnnntttttttttttgtatagagtaaaatttattatagggttgtagaattcatacaacctaaactccttacagcattcagcacctacacaattttgtgcattccacaatacagatagtagtgagaaagaatcactgcattagttaaaaatgactgtctcatgaaaattgttcacatataagtcaggttaattacagagcacctaacagaactgcaaagatgtaatttctaaattcaagaaagttgtacaaaatgaaaaacaaaagaaaccaacaatgttgagatctgatatattttacacaaaaagttcaaaaacaatttaaaatatttcaaattttaaaattgctgcaccataagatgaataaagagcttacttaaaggaaaagaaaaaacaaacaaacaaaaaaaacaacggatggaatttattgtcaggatgttaggtgatatattcatgctgctttcagaaatctaaaccctataaattcaaagaaaaaatgaaactcangtaatttcagtttcaaaaaacaagcaatgccaattaaactaaaatttgacaagagcttgcagtggttagtagttttttttttttnnttttttttaaagcataagcaatagagtaaatgcatgagtaaatatcttgagtatcccataaaccttaatgttaaagtcatattgtaaatctctgacttcttattaccaaggacactctatctgttgcctcttactcttgacagatcttggtctcaacaataaattcgttggggaagtgtctaatcttccagcatttatcaatggcacgtttgttgaaacccagcaagaggtctctgcgacgaaggcggaaggactttctgttattgcaaagttggtaaataaagatgccaaggttactaacatcacgaatttcctccacagcaactaggtcttctcgaaccacataagtttgaggcagatatctgccactcgccagtttgccaaagagctctaccagattttttnggaggcataacaatagaagtattgaggggcatcagatagcagttccccagcaacaagtccaggtaagcagtcattcccttttcaaagtcatgaataattgctgcagggtcactatcagagaaactggggacaggcacatcaatgattgcaatgttgtcatcctcacgaatgtcagcctcctcagtcacaggcaggaagttaggctctcctccacgaagggaatttgcaggatcctcagaatcaaaaaagcacatctctccacggtaaatggtgctcttgggcatgaagtacttgtaaatgcaggctccaccaacaataagtcctgccaagatgaatgaaaggcctaagagagtaagcatacatctcccagaggagccctctttttcctgggtggcaactcggagctccttgccggtcagtatctgagttctgaccgtgcggctcaggagggcctccacgtcttgccgcgcctcctccttttgcacggcggtaggggtattgaaggcgattttcaccatagtgaatcttcgggctgcgcggtaaggcgctgctggaatcagcgtcctgggctgcagactgcaagaggagatcctgttagcccaaacagcacttactttatcttcagtctaacactactgcaagccgaggtctgggatncttatgnnnnagtcccaaactggggggagaccgtgggcgggcccagggaggtgcctaaagggaggagcgagagggggcccaaaaggggcccaagtgcctgagttgggggtttgcgaggtggcgcggatttgccactgggggaagagcaggggaagtggagtccgtggccggctcaggctaaacgtgcctcacctgcc

SEQ ID NO: 120 - DNA, 3775 bp, Homo sapiens
cattcataagactcagagctacggccacggcagggacacgcggaaccaagacttggaaacttgattgttgtggttcttcttgggggttatgaaatttcattaatcttttttttttccggggagaaagtttttggaaagattcttccagatatttcttcattttcttttggaggaccgacttactttttttggtcttctttattactcccctccccccgtgggacccgccggacgcgtggaggagaccgtagctgaagctgattctgtacagcgggacagcgctttctgcccctgggggagcaacccctccctcgcccctgggtcctacggagcctgcactttcaagaggtacagcggcatcctgtgggggcctgggcaccgcaggaagactgcacagaaactttgccattgttggaacgggacgttgctccttccccgagcttccccggacagcgtactttgaggactcgctcagctcaccggggactcccacggctcaccccggacttgcaccttacttccccaacccggccatagccttggcttcccggcgacctcagcgtggtcacaggggcccccctgtgcccagggaaatgtttcaggctttccccggagactacgactccggctcccggtgcagctcctcaccctctgccgagtctcaatatctgtcttcggtggactccttcggcagtccacccaccgccgcggcctcccaggagtgcgccggtctcggggaaatgcccggttccttcgtgcccacggtcaccgcgatcacaaccagccaggacctccagtggcttgtgcaacccaccctcatctcttccatggcccagtcccaggggcagccactggcctcccagcccccggtcgtcgacccctacgacatgccgggaaccagctactccacaccaggcatgagtggctacagcagtggcggagcgagtggcagtggtgggccttccaccagcggaactaccagtgggcctgggcctgcccgcccagcccgagcccggcctaggagaccccgagaggagacgctcaccccagaggaagaggagaagcgaagggtgcgccgggaacgaaataaactagcagcagctaaatgcaggaaccggcggagggagctgaccgaccgactccaggcggagacagatcagttggaggaagaaaaagcagagctggagtcggagatcgccgagctccaaaaggagaaggaacgtctggagtttgtgctggtggcccacaaaccgggctgcaagatcccctacgaagaggggcccgggccgggcccgctggcggaggtgagagatttgccgggctcagcaccggctaaggaagatggcttcagctggctgctgccgcccccgccaccaccgcccctgcccttccagaccagccaagacgcaccccccaacctgacggcttctctctttacacacagtgaagttcaagtcctcggcgaccccttccccgttgttaacccttcgtacacttcttcgtttgtcctcacctgcccggaggtctccgcgttcgccggcgcccaacgcaccagcggcagtgaccagccttccgatcccctgaactcgccctccctcctcgctcggtgaactctttagacacacaaaacaaacaaacacatgggggagagagacttggaagaggaggaggaggaggagaaggaggagagagaggggaagagacaaagtgggtgtgtggcctccctggctcctccgtctgaccctctgcggccactgcgccactgccatcggacaggaggattccttgtgttttgtcctgcctcttgtttctgtgccccggcgaggccggagagctggtgactttggggacagggggtgggaaggggatggacacccccagctgactgttggctctctgacgtcaacccaagctctggggatgggtggggaggggggcgggtgacgcccaccttcgggcagtcctgtgtgaggatgaagggacgggggtgggaggtaggctgtggggtgggctggagtcctctccagagaggctcaacaaggaaaaatgccactccctacccaatgtctcccacacccaccctttttttggggtgcccaggttggtttcccctgcactcccgaccttagcttattgatcccacatttccatggtgtgagatcctctttactctgggcagaagtgagcccccccttaaagggaattcgatgcccccctagaataatctcatccccccacccgacttcttttgaaatgtgaacgtccttccttgactgtctagccactccctcccagaaaaactggctctgattggaatttctggcctcctaaggctccccaccccgaaatcagcccccagccttgtttctgatgacagtgttatcccaagaccctgccccctgccagccgaccctcctggccttcctcgttgggccgctctgatttcaggcagcaggggctgctgtgatgccgtcctgctggagtgatttatactgtgaaatgagttggccagattgtggggtgcagctgggtggggcagcacacctctggggggataatgtccccactcccgaaagcctttcctcggtctcccttccgtccatcccccttcttcctcccctcaacagtgagttagactcaagggggtgacagaaccgagaagggggtgacagtcctccatccacgtggcctctctctctctcctcaggaccctcagccctggcctttttctttaaggtcccccgaccaatccccagcctaggacgccaacttctcccaccccttggcccctcacatcctctccaggaaggcagtgaggggctgtgacatttttccggagaagatttcagagctgaggctttggtacccccaaacccccaatatttttggactggcagactcaaggggctggaatctcatgattccatgcccgagtccgcccatccctgaccatggttttggctctcccaccccgccgttccctgcgcttcatctcatgaggatttctttatgaggcaaatttatattttttaatatcggggggtggaccacgccgccctccatccgtgctgcatgaaaaacattccacgtgccccttgtcgcgcgtctcccatcctgatcccagacccattccttagctatttatccctttcctggtttccgaaaggcaattatatctattatgtataagtaaatatattatatatggatgtgtgtgtgtgcgtgcgcgtgagtgtgtgagcgcttctgcagcctcggcctaggtcacgttggccctcaaagcgagccgttgaattggaaactgcttctagaaactctggctcagcctgtctcgggctgacccttttctgatcgtctcggcccctctgattgttcccgatggtctctctccctctgtcttttctcctccgcctgtgtccatctgaccgttttcacttgtctcctttctgactgtccctgccaatgctccagctgtcgtctgactctgggttcgttggggacatgagattttattttttgtgagtgagactgagggatcgtagatttttacaatctgtatctttgacaattctgggtgcgagtgtgagagtgtgagcagggcttgctcctgccaaccacaattcaatgaatccccgacccccctaccccatgctgtacttgtggttctctttttgtattttgcatctgaccccggggggctgggacagattggcaatgggccgtcccctctccccttggttctgcactgttgccaataaaaagctcttaaaaacgc

SEQ ID NO: 121 - DNA, 531 bp, Homo sapiens
ggcccttcagtatgcgcggacggaagatggcgtccgccacccgtctcatccagcggctgcggaactgggcgtccgggcatgacctgcaggggaagctgcagctacgctaccaggagatctccaagcgaactcagcctcctcccaagctccctgtgggtcctagccacaagctctccaacaattactattgcactcgcgatggccgccgggaatctgtgcccccttccatcatcatgtcgtcgcagaaggcgctggtgtcaggcaagccagcagagagctctgctgtagctgccactgagaagaaggcggtgactccagctcctcccataaagaggtgggagctgtcctcggaccagccttacctgtgacactgcaccctcacggccacccgactactttgcctccttggatttcctccagggagaatgtgacctaatttatgacaaatacgtagagctcaggtatcacttctagttttactttaaaaaataaaaaaatagagacagagtctcaaaaaaaaaaaaaaaaaaa

SEQ ID NO: 122 - DNA, 4152 bp, Homo sapiens
  modified_base (8)..(8): a, c, g, or t
  modified_base (303)..(303): a, c, g, or t
  modified_base (609)..(609): a, c, g, or t
  modified_base (906)..(907): a, c, g, or t
  modified_base (909)..(911): a, c, g, or t
  modified_base (913)..(914): a, c, g, or t
  modified_base (1928)..(1928): a, c, g, or t
  modified_base (2650)..(2651): a, c, g, or t
  modified_base (2718)..(2718): a, c, g, or t
  modified_base (2745)..(2745): a, c, g, or t
  modified_base (3489)..(3489): a, c, g, or t
  modified_base (3899)..(3899): a, c, g, or t
  modified_base (3954)..(3965): a, c, g, or t
  modified_base (4035)..(4035): a, c, g, or t
  modified_base (4049)..(4049): a, c, g, or t
agcggagngccgaaagcggagctcgaaactgactggaaacttcagtggcgcggagactcgccagtttcaaccccggaaacttttctttgcaggaggagaagagaaggggtgcaagcgcccccacttttgctctttttcctcccctcctcctcctctccaattcgcctccccccacttggagcgggcagctgtgaactggccaccccgcgccttcctaagtgctcgccgcggtagccggccgacgcgccagcttccccgggagccgcttgctccgcatccgggcagccgaggggagaggagccngcgcctcgagtccccgagccgccgcggcttctcgcctttcccggccaccagccccctgccccgggcccgcgtatgaatctcctggaccccttcatgaagatgaccgacgagcaggagaagggcctgtccggcgcccccagccccaccatgtccgaggactccgcgggctcgccctgcccgtcgggctccggctcggacaccgagaacacgcggccccaggagaacacgttccccaagggcgagcccgatctgaagaaggagagcgaggaggacaagttccccgtgtgcatccgcgaggcggtcagncaggtgctcaaaggctacgactggacgctggtgcccatgccggtgcgcgtcaacggctccagcaagaacaagccgcacgtcaagcggcccatgaacgccttcatggtgtgggcgcaggcggcgcgcaggaagctcgcggaccagtacccgcacttgcacaacgccgagctcagcaagacgctgggcaagctctggagacttctgaacgagagcgagaagcggcccttcgtggaggaggcggagcggctgcgcgtgcagcacaagaaggaccacccggattacaagtaccagccgcgnngnnngnngtcggtgaagaacgggcaggcggaggcagaggaggccacggagcagacgcacatctcccccaacgccatcttcaaggcgctgcaggccgactcgccacactcctcctccggcatgagcgaggtgcactcccccggcgagcactcggggcaatcccagggcccaccgaccccacccaccacccccaaaaccgacgtgcagccgggcaaggctgacctgaagcgagaggggcgccccttgccagaggggggcagacagccccctatcgacttccgcgacgtggacatcggcgagctgagcagcgacgtcatctccaacatcgagaccttcgatgtcaacgagtttgaccagtacctgccgcccaacggccacccgggggtgccggccacgcacggccaggtcacctacacgggcagctacggcatcagcagcaccgcggccaccccggcgagcgcgggccacgtgtggatgtccaagcagcaggcgccgccgccacccccgcagcagcccccacaggccccgccggccccgcaggcgcccccgcagccgcaggcggcgcccccacagcagccggcggcacccccgcagcagccacaggcgcacacgctgaccacgctgagcagcgagccgggccagtcccagcgaacgcacatcaagacggagcagctgagccccagccactacagcgagcagcagcagcactcgccccaacagatcgcctacagccccttcaacctcccacactacagcccctcctacccgcccatcacccgctcacagtacgactacaccgaccaccagaactccagctcctactacagccacgcggcaggccagggcaccggcctctactccaccttcacctacatgaaccccgctcagcgccccatgtacacccccatcgccgacacctctggggtcccttccatcccgcagacccacagcccccagcactgggaacaacccgtctacacacagctcactcgaccttgaggaggcctcccacgaagggcgangatggccgagatgatcctaaaaataaccgaagaaagagaggaccaaccagaattccctttggacatttgtgtttttttgtttttttattttgttttgttttttcttcttcttcttcttccttaaagacatttaagctaaaggcaactcgtacccaaatttccaagacacaaacatgacctatccaagcgcattacccacttgtggccaatcagtggccaggccaaccttggctaaatggagcagcgaaatcaacgagaaactggactttttaaaccctcttcagagcaagcgtggaggatgatggagaatcgtgtgatcagtgtgctaaatctctctgcctgtttggactttgtaattatttttttagcagtaattaaagaaaaaagtcctctgtgaggaatattctctattttaaatatttttagtatgtactgtgtatgattcattaccattttgaggggatttatacatatttttagataaaattaaatgctcttatttttccaacagctaaactactcttagttgaacagtgtgccctagcttttcttgcaaccagagtatttttgtacagatttgctttctcttacaaaaagaaaaaaaaaatcctgttgtattaacatttaaaaacagaattgtgttatgtgatcagttttgggggttaactttgcttaattcctcaggctttgcgatttaaggaggagctgccttaaaaaaaaanntaaaggccttattttgcaattatgggagtaaacaatagtctagagaagcatttggtaagctttatcntatatatattttttaaagaagagaaanacaccttgagccttaaaacggtgctgctgggaaacatttgcactcttttagtgcatttcctcctgcctttgcttgttcactgcagtcttaagaaagaggtaaaaggcaagcaaaggagatgaaatctgttctgggaatgtttcagcagccaataagtgcccgagcacactgcccccggttgcctgcctgggccccatgtggaaggcagatgcctgctcgctctgtcacctgtgcctctcagaacaccagcagttaaccttcaagacattccacttgctaaaattatttattttgtaaggagaggttttaattaaaacaaaaaaaaattcttttttttttttttttttccaattttaccttctttaaaataggttgttggagctttcctcaaagggtatggtcatctgttgttaaattatgttcttaactgtaaccagtttttttttatttatctctttaatctttttttattattaaaagcaagtttctttgtattcctcaccctagatttgtataaatgcctttttgtccatcccttttttctttgttgtttttgttgaaaacaaactggaaacttgtttctttttttgtataaatgagagattgcaaatgtagtgtatcactgagtcatttgcagtgttttctgccacagacctttgggctgccttatattgtgtgtgtgtgtgggtgtgtgtgtgttttgacacaaaaacaatgcaagcatgtgtcatccatatttctctncatcttctcttggagtgagggaggctacctggaggggatcagcccactgacagaccttaatcttaattactgctgtggctagagagtttgaggattgctttttaaaaaagacagcaaacttttttttttatttaaaaaaagatatattaacagttttagaagtcagtagaataaaatcttaaagcactcataatatggcatccttcaatttctgtataaaagcagatctttttaaaaaagatacttctgtaacttaagaaacctggcatttaaatcatattttgtctttaggtaaaagctttggtttgtgttcgtgttttgtttgtttcacttgtttccctcccagccccaaaccttttgttctctccgtgaaacttacctttccctttttctttctctttttttttttngtatattattgtttacaataaatatacattgcattaaaaaaaaaaaaaaaaaaannnnnnnnnnnnaaaaaaaaaaaaaaaaaaaaaggggggaaaaaaaaccaaaaagggccaaaaagggagaggaagaaaaaanaaaggcccggcggnaaaaaacggcagggcgggggaaaaacccgggcgaaaccaaacttggggggcgtggggggaacaatcccctttttttctcaattgtggtaaatggcctgaaaaa

SEQ ID NO: 123 - DNA, 4910 bp, Homo sapiens
tagacgcaccctctgaagatggtgactccctcctgagaagctggaccccttggtaaaagacaaggccttctccaagaagaatatgaaagtgttactcagacttatttgtttcatagctctactgatttcttctctggaggctgataaatgcaaggaacgtgaagaaaaaataattttagtgtcatctgcaaatgaaattgatgttcgtccctgtcctcttaacccaaatgaacacaaaggcactataacttggtataaagatgacagcaagacacctgtatctacagaacaagcctccaggattcatcaacacaaagagaaactttggtttgttcctgctaaggtggaggattcaggacattactattgcgtggtaagaaattcatcttactgcctcagaattaaaataagtgcaaaatttgtggagaatgagcctaacttatgttataatgcacaagccatatttaagcagaaactacccgttgcaggagacggaggacttgtgtgcccttatatggagttttttaaaaatgaaaataatgagttacctaaattacagtggtataaggattgcaaacctctacttcttgacaatatacactttagtggagtcaaagataggctcatcgtgatgaatgtggctgaaaagcatagagggaactatacttgtcatgcatcctacacatacttgggcaagcaatatcctattacccgggtaatagaatttattactctagaggaaaacaaacccacaaggcctgtgattgtgagcccagctaatgagacaatggaagtagacttgggatcccagatacaattgatctgtaatgtcaccggccagttgagtgacattgcttactggaagtggaatgggtcagtaattgatgaagatgacccagtgctaggggaagactattacagtgtggaaaatcctgcaaacaaaagaaggagtaccctcatcacagtgcttaatatatcggaaattgaaagtagattttataaacatccatttacctgttttgccaagaatacacatggtatagatgcagcatatatccagttaatatatccagtcactaatttccagaagcacatgattggtatatgtgtcacgttgacagtcataattgtgtgttctgttttcatctataaaatcttcaagattgacattgtgctttggtacagggattcctgctatgattttctcccaataaaagcttcagatggaaagacctatgacgcatatatactgtatccaaagactgttggggaagggtctacctctgactgtgatatttttgtgtttaaagtcttgcctgaggtcttggaaaaacagtgtggatataagctgttcatttatggaagggatgactacgttggggaagacattgttgaggtcattaatgaaaacgtaaagaaaagcagaagactgattatcattttagtcagagaaacatcaggcttcagctggctgggtggttcatctgaagagcaaatagccatgtataatgctcttgttcaggatggaattaaagttgtcctgcttgagctggagaaaatccaagactatgagaaaatgccagaatcgattaaattcattaagcagaaacatggggctatccgctggtcaggggactttacacagggaccacagtctgcaaagacaaggttctggaagaatgtcaggtaccacatgccagtccagcgacggtcaccttcatctaaacaccagttactgtcaccagccactaaggagaaactgcaaagagaggctcacgtgcctctcgggtagcatggagaagttgccaagagttctttaggtgcctcctgtcttatggcgttgcaggccaggttatgcctcatgctgacttgcagagttcatggaatgtaactatatcatcctttatccctgaggtcacctggaatcagattattaagggaataagccatgacgtcaatagcagcccagggcacttcagagtagagggcttgggaagatcttttaaaaaggcagtaggcccggtgtggtggctcacgcctataatcccagcactttgggaggctgaagtgggtggatcaccagaggtcaggagttcgagaccagcccagccaacatggcaaaaccccatctctactaaaaatacaaaaatgagctaggcatggtggcacacgcctgtaatcccagctacacctgaggctgaggcaggagaattgcttgaaccggggagacggaggttgcagtgagccgagtttgggccactgcactctagcctggcaacagagcaagactccgtctcaaaaaaagggcaataaatgccctctctgaatgtttgaactgccaagaaaaggcatggagacagcgaactagaagaaagggcaagaaggaaatagccaccgtctacagatggcttagttaagtcatccacagcccaagggcggggctatgccttgtctggggaccctgtagagtcactgaccctggagcggctctcctgagaggtgctgcaggcaaagtgagactgacacctcactgaggaagggagacatattcttggagaactttccatctgcttgtattttccatacacatccccagccagaagttagtgtccgaagaccgaattttattttacagagcttgaaaactcacttcaatgaacaaagggattctccaggattccaaagttttgaagtcatcttagctttccacaggagggagagaacttaaaaaagcaacagtagcagggaattgatccacttcttaatgctttcctccctggcatgaccatcctgtcctttgttattatcctgcattttacgtctttggaggaacagctccctagtggcttcctccgtctgcaatgtcccttgcacagcccacacatgaaccatccttcccatgatgccgctcttctgtcatcccgctcctgctgaaacacctcccaggggctccacctgttcaggagctgaagcccatgctttcccaccagcatgtcactcccagaccacctccctgccctgtcctccagcttcccctcgctgtcctgctgtgtgaattcccaggttggcctggtggccatgtcgcctgcccccagcactcctctgtctctgctcttgcctcgacccttcctcctcctttgcctaggaggccttctcgcattttctctagctgatcagaattttaccaaaattcagaacatcctccaattccacagtctctgggagactttccctaagaggcgacttcctctccagccttctctctctggtcaggcccactgcagagatggtggtgagcacatctgggaggctggtctccctccagctggaattgctgctctctgagggagaggctgtggtggctgtctctgtccctcactgccttccaggagcaatttgcacatgtaacatagatttatgtaatgctttatgtttaaaaacattccccaattatcttatttaatttttgcaattattctaattttatatatagagaaagtgacctattttttaaaaaaatcacactctaagttctattgaacctaggacttgagcctccatttctggcttctagtctggtgttctgagtacttgatttcaggtcaataacggtcccccctcactccacactggcacgtttgtgagaagaaatgacattttgctaggaagtgaccgagtctaggaatgcttttattcaagacaccaaattccaaacttctaaatgttggaattttcaaaaattgtgtttagattttatgaaaaactcttctactttcatctattctttccctagaggcaaacatttcttaaaatgtttcattttcattaaaaatgaaagccaaatttatatgccaccgattgcaggacacaagcacagttttaagagttgtatgaacatggagaggacttttggtttttatatttctcgtatttaatatgggtgaacaccaacttttatttggaataataattttcctcctaaacaaaaacacattgagtttaagtctctgactcttgcctttccacctgctttctcctgggcccgctttgcctgcttgaaggaacagtgctgttctggagctgctgttccaacagacagggcctagctttcatttgacacacagactacagccagaagcccatggagcagggatgtcacgtcttgaaaagcctattagatgttttacaaatttaattttgcagattattttagtctgtcatccagaaaatgtgtcagcatgcatagtgctaagaaagcaagccaatttggaaacttaggttagtgacaaaattggccagagagtgggggtgatgatgaccaagaattacaagtagaatggcagctggaatttaaggagggacaagaatcaatggataagcgtgggtggaggaagatccaaacagaaaagtgcaaagttattccccatcttccaagggttgaattctggaggaagaagacacattcctagttccccgtgaacttcctttgacttattgtccccactaaaacaaaacaaaaaacttttaatgccttccacattaattagattttcttgcagtttttttatggcatttttttaaagatgccctaagtgttgaagaagagtttgcaaatgcaacaaaaatatttaattaccggttgttaaaactggtttagcacaatttatattttccctctcttgcctttcttatttgcaataaaaggtattgagccattttttaaatgacatttttgataaattatgtttgtactagttgatgaaggagttttttttaacctgtttatataattttgcagcagaagccaaattttttgtatattaaagcaccaaattcatgtacagcatgcatcacggatcaatagactgtacttattttccaataaaattttcaaactttgtactgttaaa

SEQ ID NO: 124 - DNA, 783 bp, Homo sapiens
ggcacgagcgagttcctgtctctctgccaacgccgcccggatggcttcccaaaaccgcgacccagccgccactagcgtcgccgccgcccgtaaaggagctgagccgagcgggggcgccgcccggggtccggtgggcaaaaggctacagcaggagctgatgaccctcatgatgtctggcgataaagggatttctgccttccctgaatcagacaaccttttcaaatgggtagggaccatccatggagcagctggaacagtatatgaagacctgaggtataagctctcgctagagttccccagtggctacccttacaatgcgcccacagtgaagttcctcacgccctgctatcaccccaacgtggacacccagggtaacatatgcctggacatcctgaaggaaaagtggtctgccctgtatgatgtcaggaccattctgctctccatccagagccttctaggagaacccaacattgatagtcccttgaacacacatgctgccgagctctggaaaaaccccacagcttttaagaagtacctgcaagaaacctactcaaagcaggtcaccagccaggagccctgacccaggctgcccagcctgtccttgtgtcgtctttttaatttttccttagatggtctgtcctttttgtgatttctgtataggactctttatcttgagctgtggtatttttgttttgtttttgtcttttaaattaagcctcggttgagcccttgtatattaaataaatgcatttttgtccttttttaaaaaaaaaaaaaaaaaaa

SEQ ID NO: 125 - DNA, 1967 bp, Homo sapiens
  modified_base (1289)..(1289): a, c, g, or t
  modified_base (1766)..(1766): a, c, g, or t
  modified_base (1915)..(1915): a, c, g, or t
  modified_base (1917)..(1920): a, c, g, or t
ggggggggggggcacttggcttcaaagctggctcttggaaattgagcggagagcgacgcggcttgttgtagctgccgctgcggccgccgcggaataataagccgggatctaccatacccattgactaactatggaagattataccaaaatagagaaaattggagaaggtacctatggagttgtgtataagggtagacacaaaactacaggtcaagtggtagccatgaaaaaaatcagactagaaagtgaagaggaaggggttcctagtactgcaattcgggaaatttctctattaaaggaacttcgtcatccaaatatagtcagtcttcaggatgtgcttatgcaggattccaggttatatctcatctttgagtttctttccatggatctgaagaaatacttggattctatccctcctggtcagtacatggattcttcacttgttaagagttatttataccaaatcctacaggggattgtgttttgtcactctagaagagttcttcacagagacttaaaacctcaaaatctcttgattgatgacaaaggaacaattaaactggctgattttggccttgccagagcttttggaatacctatcagagtatatacacatgaggtagtaacactctggtacagatctccagaagtattgctggggtcagctcgttactcaactccagttgacatttggagtataggcaccatatttgctgaactagcaactaagaaaccacttttccatggggattcagaaattgatcaactcttcaggattttcagagctttgggcactcccaataatgaagtgtggccagaagtggaatctttacaggactataagaatacatttcccaaatggaaaccaggaagcctagcatcccatgtcaaaaacttggatgaaaatggcttggatttgctctcgaaaatgttaatctatgatccagccaaacgaatttctggcaaaatggcactgaatcatccatattttaatgatttggacaatcagattaagaagatgtagctttctgacaaaaagtttccatatgttatgtcaacagatagttgtgtttttattgttaactcttgtctatttttgtcttatatatatttctttgttatcaaacttcagctgtacttcgtcttctaatttcaaaaatataacttaaaaatgtaaatattctatatgaatttaaatataattctgtaaatgtgtgtaggtctcactgtaacaactatttgttactataataaaactataatattgatgtcaggaatcaggaaaaaantttgagttggcttaaatcatctcagtccttatggcagttttattttcctgtagttggaactactaaaatttaggaaaatgctaagttcaagtttcgtaatgctttgaagtatttttatgctctgaatgtttaaatgttctcatcagtttcttgccatgttgttaactatacaacctggctaaagatgaatatttttctactggtattttaatttttgacctaaatgtttaagcattcggaatgagaaaactatacagatttgagaaatgatgctaaatttataggagttttcagtaacttaaaaagctaacatgagagcatgccaaaatttgctaagtcttacaaagatcaagggctgtccgcaacagggaagaacagttttgaaaatttatgaactatcttatttttaggtaggttttgaaagctttttgtctaagtgaattcttatgccttggtcagagtaataactgaaggagntgcttatcttggctttcgagtctgagtttaaaactacacattttgacatagtgtttattagcagccatctaaaaaggctctaatgtatatttaactaaaattactagctttgggaattaaactgtttaacaaataaaaaaaaaaaaaanannnntacctataagcagcctaatttgaattatttgctccatctacatagtg

SEQ ID NO: 126 - DNA, 1220 bp, Homo sapiens
  modified_base (4)..(4): a, c, g, or t
  modified_base (9)..(11): a, c, g, or t
  modified_base (13)..(13): a, c, g, or t
  modified_base (16)..(16): a, c, g, or t
agcngagtnnnantcngccccagcggaggtgaaggacgtccttccccaggagccgactggccaatcacaggcaggaagatgaaggttctgtgggctgcgttgctggtcacattcctggcaggatgccaggccaaggtggagcaagcggtggagacagagccggagcccgagctgcgccagcagaccgagtggcagagcggccagcgctgggaactggcactgggtcgcttttgggattacctgcgctgggtgcagacactgtctgagcaggtgcaggaggagctgctcagctcccaggtcacccaggaactgagggcgctgatggacgagaccatgaaggagttgaaggcctacaaatcggaactggaggaacaactgaccccggtggcggaggagacgcgggcacggctgtccaaggagctgcaggcggcgcaggcccggctgggcgcggacatggaggacgtgtgcggccgcctggtgcagtaccgcggcgaggtgcaggccatgctcggccagagcaccgaggagctgcgggtgcgcctcgcctcccacctgcgcaagctgcgtaagcggctcctccgcgatgcccgatgacctgcagaagcgcctggcagtgtaccaggccggggcccgcgagggcgccgagcgcggcctcagcgccatccgcgagcgcctggggcccctggtggaacagggccgcgtgcgggccgccactgtgggctccctggccggccagccgctacaggagcgggcccaggcctggggcgagcggctgcgcgcgcggatggaggagatgggcagccggacccgcgaccgcctggacgaggtgaaggagcaggtggcggaggtgcgcgccaagctggaggagcaggcccagcagatacgcctgcaggccgaggccttccaggcccgcctcaagagctggttcgagcccctggtggaagacatgcagcgccagtgggccgggctggtggagaaggtgcaggctgccgtgggcaccagcgccgcccctgtgcccagcgacaatcactgaacgccgaagcctgcagccatgcgaccccacgccaccccgtgcctcctgcctccgcgcagcctgcagcgggagaccctgtccccgccccagccgtcctcctggggtggaccctagtttaataaagattcaccaagtttcacgcaaaaaaaaaaaaaaaaaaaaaaaaaaaaaaaaaaaaaaaaaaaac

SEQ ID NO: 127 - DNA, 728 bp, Homo sapiens
gcggcctcagatgaatgcggctgttaagacctgcaataatccagaatggctactctgatctatgttgataaggaaaatggagaaccaggcacccgtgtggttgctaaggatgggctgaagctggggtctggaccttcaatcaaagccttagatgggagatctcaagtttcaacaccacgttttggcaaaacgttcgatgccccaccagccttacctaaagctactagaaaggctttgggaactgtcaacagagctacagaaaagtctgtaaagaccaagggacccctcaaacaaaaacagccaagcttttctgccaaaaagatgactgagaagactgttaaagcaaaaagctctgttcctgcctcagatgatgcctatccagaaatagaaaaattctttcccttcaatcctctagactttgagagttttgacctgcctgaagagcaccagattgcgcacctccccttgagtggagtgcctctcatgatccttgacgaggagagagagcttgaaaagctgtttcagctgggccccccttcacctgtgaagatgccctctccaccatgggaatccaatctgttgcagtctccttcaagcattctgtcgaccctggatgttgaattgccacctgtttgctgtgacatagatatttaaatttcttagtgcttcagagtttgtgtgtatttgtattaataaagcattcttcaacagaaaaaaaaaaaaaaaaa

SEQ ID NO: 128 - DNA, 3138 bp, Homo sapiens
  modified_base (90)..(90): a, c, g, or t
  modified_base (129)..(129): a, c, g, or t
  modified_base (143)..(143): a, c, g, or t
  modified_base (149)..(149): a, c, g, or t
  modified_base (160)..(161): a, c, g, or t
  modified_base (164)..(164): a, c, g, or t
  modified_base (173)..(173): a, c, g, or t
  modified_base (187)..(187): a, c, g, or t
  modified_base (191)..(191): a, c, g, or t
  modified_base (195)..(195): a, c, g, or t
  modified_base (210)..(210): a, c, g, or t
  modified_base (231)..(231): a, c, g, or t
  modified_base (238)..(238): a, c, g, or t
  modified_base (242)..(242): a, c, g, or t
  modified_base (244)..(246): a, c, g, or t
  modified_base (272)..(273): a, c, g, or t
  modified_base (284)..(284): a, c, g, or t
  modified_base (363)..(363): a, c, g, or t
  modified_base (366)..(367): a, c, g, or t
  modified_base (685)..(685): a, c, g, or t
  modified_base (694)..(694): a, c, g, or t
  modified_base (700)..(700): a, c, g, or t
  modified_base (711)..(711): a, c, g, or t
  modified_base (724)..(724): a, c, g, or t
  modified_base (1658)..(1658): a, c, g, or t
  modified_base (3115)..(3115): a, c, g, or t
  modified_base (3118)..(3120): a, c, g, or t
agacaatttttctgaaatttttcttctctcaagcttcttggcctgacaagcataagtgcctctgccttccttcgccgcacctctcgccanccgccgcctctgcggcttacttgaaggcttgcttgcttnttgccgccgccgcngccgcngccgccgcttnngcntgcccacancgctcccgagctanggancaangccccatccgagcgncgtgggcgtcgtaggggaganggagggncggntnnnctccgctgcaacagcaaagtttgagnncgaagcctagncgactcgcagcgccggtcccgcagtttcacctcttttttttttaactccgccagaggaccccgacccacaggtcccggnttnntccgctggtcaaagtgcgtgcggagtagttggcaaagttgagagcggagacgtctctgggaacagctgtttgcgttccgggcggaggcggcgcgctgagctccttggccttgagccagcgagcctagaaggaggatggaggttttgggccccaggggaggacacagagacggcgggatggcgcagggacttgaggcttgagatcccgtccttcagctcaggtcccgtcgcgcttttaccccttcccggtgacctcaacccctttataccgaccccacctctttggagccgggagtaccgcccctgtagggggaggggnagaggaggngatttngaacgcggatnggatcgtctgggnacccgtagttgggaacagcggaacgctggtcccggggactgagtaaggtgtctggatcggagggaggttcgggtgggcatcgggcggctggaagagctcgactcgtcccgctgggaaagcgcgagtctgagtggaaccctggacgacttgcagagcggctggcgcagtcatggcggactactggaagtcacagccaaagaaattctgtgattactgcaagtgctggatagcagacaataggcctagtgttgaatttcatgaaagaggaaagaatcataaggaaaatgtggcaaaaaggatcagtgagattaaacagaaaagcctggataaggcaaaggaagaagaaaaggcatcaaaggagtttgctgcaatggaggcagctgccctgaaagcataccaagaggatttgaaaagacttggcttagagtcagaaattttggagccaagcataacaccagtaaccagcactatcccacctacctcgacatcaaatcaacagaaagaaaagaaagaaaagaagaaaagaaaaaaagatccttcaaagggcagatgggtagaaggcataacctctgagggttaccattactattatgatcttatctcaggagcatctcagtgggagaaacctgaaggatttcaaggagacttaaaaaagacagcagtgaagaccgtttgggtagaaggtttaagtgaagatggttttacctattactataatacagaaacaggagaatccagatgggagaaacctgatgatttcattccacacactagtgatctgccttctagtaaggtcaatgaaaattcacttggcaccctagatgaatccaaatcatcagattcgcatagtgattctgatggggaacaggaagcagaagaaggaggggtctctacagagacagaaaagccaaaaataaagtttaaggaaaaaaantaaaaatagtgatggaggaagtgacccagaaacacagaaagaaaaaagtattcagaaacagaattcattaggttcaaatgaagaaaaatcgaaaactcttaagaaatcaaacccatatggagaatggcaagaaattaaacaagaggttgagtctcatgaggaggtagatttggaacttccaagcactgaaaatgagtatgtatcaacttcagaagctgatggtggcggagaacccaaagtggtatttaaagaaaaaacagtcacttctcttggagttatggcagatggagtggccccagtcttcaaaaagagaagaactgaaaatggaaaatctagaaatttaaggcaacgaggtgatgatcaatagttgcaggagagctttttgtacatgcttttaggacagaatggagacttatacacccaaagtttatctgtgtttgtttgtaagtattatgatgctaaaaatttagatttattctaaatgtatttgatgtgaattaaaataaatattttttcatgtgaaatttattttggttcctaaaatggaagcctaccacattgcattgtaatacagtgtattatgttcagtgtctaaaaactgctaattaagtcataatttaagatgctatgtatctgttatttaaaacatggagaaacagggcctttattccattcatattcataagagcatatttatcctgcattgaaaatgcattacttttgcacattgatattaactgttgtccaacaaataagtatcggagtacgtgagaatattcccagcccagtgatgatttggttctgaggctgatgtgagaaagctgatgtaaaaaatgtatgcatattggcttaccttactcaatttaaagtcaaaagccaacagccaggagcagctcaggtacttcagatgtgcttaatatggagtgaaaactggaccagaggtggaaagatgtatttgccccagttcacttcaaagcagcaaacgttgtttaagcattttagtttgaaccaggcattgtgttaggaatccagggataaagatgaatgaaatgtatttctgttcttcaggagttcacattctagcatatgccttttttcccccagtcatgcactctttttagcagtcttatatgtactagaaaagattttttaaagtttatttaaagctgtgtagatgaaggcttgatctaaaatagtataaggtctccagcttcagtaaaagtttttagtgtttacttaaattagtaatttctcactttctgtctggttaaaatgtcttaaaaagtagaattttcttctttaatccgtttagtagttacctcccttttacttttcaaattcacaaaattacatttctcataaattgtatagtatttaacttataatagttaatatttgtctttttaagatgactgtacatgtaagaaaaaagcttattaaaaacttgatcaaagaanaannnaaaaaaaaaaaaaaagtt

SEQ ID NO: 129 - DNA, 2907 bp, Homo sapiens
  modified_base (1894)..(1894): a, c, g, or t
  modified_base (1990)..(1990): a, c, g, or t
  modified_base (2388)..(2388): a, c, g, or t
  modified_base (2506)..(2506): a, c, g, or t
  modified_base (2509)..(2509): a, c, g, or t
ggaattcggcacgagggacggcgggccccgcttccggcccgggcgtcgtgcgtgacccagcggcgtcacagccgaggaagcggcccggccgggagggcggggaggcgcgcggcgatcggacacgatggcgggaggaggcgggagtagcgacggcagcgggcgggcagctggcaggcgggcgtcccgcagtagcgggcgggcccggcgggggcgccacgagccggggctggggggcccggcggagcgcggcgcgggggaggcacggctggaagaggcagtcaatcgctgggtgctcaagttctacttccacgaggcgctgcgggcctttcggggtagccggtacggggacttcagacagatccgggacatcatgcaggctttgcttgtcaggcccttggggaaggagcacaccgtgtcccgattgctgcgggttatgcagtgtctgtcgcggattgaagaaggggaaaatttagactgttcctttgatatggaggctgagctcacaccactggaatcagctatcaatgtgctggagatgattaaaacggaatttacactgacagaagcagtggtcgaatccagtagaaaactggtcaaggaagctgctgtcattatttgtatcaaaaacaaagaatttgaaaaggcttcaaaaattttgaaaaaacatatgtccaaggaccccacaactcagaagctgagaaatgatctcctgaatattattcgagaaaagaacttggcccatcctgttatccagaacttttcatatgagaccttccagcagaagatgctgcgcttcctggagagccacctggatgacgccgagccctacctcctcacgatggccaaaaaggctttgaaatctgagtccgctgcctcaagtacagggaaggaagataaacagccagcaccagggcctgtggaaaagccacccagagaacccgcaaggcagctacggaatcctccaaccaccattggaatgatgactctgaaagcagctttcaagactctgtctggtgcacaggattctgaggcagcctttgcaaaactggaccagaaggatctggttcttcctactcaagctctcccagcatcaccagccctcaaaaacaagagacccagaaaagatgaaaacgaaagttcagccccggctgacggtgagggtggctcggaactgcagcccaagaacaagcgcatgacaataagcagattggtcttggaggaggacagccagagtactgagcccagcgcaggcctcaactcctcccaggaggccgcttcagcgccaccatccaagcccaccgttctcaaccaacccctccctggagagaagaatcccaaagtacccaaaggcaagtggaacagctctaatggggttgaagaaaaggagacttgggtggaagaggatgaactgtttcaagttcaggcagcaccagatgaagacagtacaaccaatataacaaaaaagcagaagtggactgtagaagaaagcgagtgggtcaaggctggagtgcagaaatatggggaaggaaactgggctgccatttctaaaaattacccatttgttaaccgaacagctgtgatgattaaggatcgctggcggaccatgaaaagacttggcatgaactgaaacaggctttcatttccacagaattcacaggagcatggttcctaataatagcccctgatagtctgctctttctttctttttcttttttttttttttttgagacagagtctcgctctgtcacccaggctggagtgcagtggcgtgatctcggctcactgcgacctccgtctcccgggctcacgccattctcctgcctcagcctccgagtagctgggactacaggcgcccgccatcacgcccggctaatgttttgtatttttagtaaanacggggtttcaccgtgttggccaggatggtctcgatctcctgacctcgtgatccacccaactcggcctcccaaagtgctgggattacaggcatganccaccgcgcctggcatctgctgtttctttcagaagctgggctgggatgagaattttgggcaacctccttcgacgtgggggaggtcccatttccacttcatcactgttggagatcatggagctaagaagcagagccaagtccacccatgtccttggcagagatgacggcacacagcttgtgcagtgccagaatatcattagcgtttcccttctttagtggtttgcttaaatttaaatccctggtaatctgtagaaccttctcctaggaaatggtgaagtctattaggagccacttgtgactccatgacctgttaaaaccagcaatgtgagtattatttggagtaaatttgttccacgtcaagttctggccttctgatgcaaatgcaaaggaacttagtntgttatgaacccaggttgatgacagaccagtccttgtggaataagattccctttaaaaactctttagccagtcgtgacatcaaccctagacctgtctgccttggcatttgctgtcaanatntgctgggctatgtaggcaggttaatcctccacttctcatgtggttgaaccagtgtgttttttggtaaaatggtgattgtagataagattagttccctgatcccctgccccctgtcccctgcctcttttcccaattcccttccttatgctggacttttaaagcttaaaaaaaatccgattgaatataaatgcctaatttcattcttttgtgaaatggttgcttcctcctgattccctaattgtgctgtgttcgtgtcttgcactggaattcaacattcccttctccttttgtactgtgttgtgcttgctgtctctcccggacacccttaaagactgtctttttagcaaaaaatttcagtaaagtgttttctgtaatctttttttaaaaaaaaaaaaaaa

SEQ ID NO: 130 - DNA, 1044 bp, Homo sapiens
tgctgctctcctcccgctccgtcctcctcgcctgccaccggtgcacccagtccgctcacccagcccagtccgtccggtcctcaccgcctgccggccggcccaccccccaccgcaggccatggacgccatcaagaagaagatgcagatgctgaagctggacaaggagaacgccatcgaccgcgccgagcaggccgaagccgacaagaagcaagctgaggaccgctgcaagcagctggaggaggagcagcaggccctccagaagaagctgaaggggacagaggatgaggtggaaaagtattctgaatccgtgaaggaggcccaggagaaactggagcaggccgagaagaaggccactgatgctgaggcagatgtggcctccctgaaccgccgcattcagctggttgaggaggagctggaccgggcccaggagcgcctggctacagccctgcagaagctggaggaggccgagaaggcggctgatgagagcgagagaggaatgaaggtcatcgaaaaccgggccatgaaggatgaggagaagatggaactgcaggagatgcagctgaaggaggccaagcacatcgctgaggattcagaccgcaaatatgaagaggtggccaggaagctggtgatcctggaaggagagctggagcgctcggaggagagggctgaggtggccgagagccgagccagacagctggaggaggaacttcgaaccatggaccaggccctcaagtccctgatggcctcagaggaggagtattccaccaaagaagataaatatgaagaggagatcaaactgttggaggagaagctgaaggaggctgagacccgagcagagtttgccgagaggtctgtggcaaagttggagaaaaccatcgatgacctagaagagaccttggccagtgccaaggaggagaacgtcgagattcaccagaccttggaccagaccctgctggaactcaacaacctgtgagggccagccccacccccagccaggctatggttgccaccccaacccaataaaactgatgttactagcctctc

SEQ ID NO: 131 - DNA, 2148 bp, Homo sapiens
gcttcagggtacagctcccccgcagccagaagccgggcctgcagcccctcagcaccgctccgggacaccccacccgcttcccaggcgtgacctgtcaacagcaacttcgcggtgtggtgaactctctgaggaaaaaccattttgattattactctcagacgtgcgtggcaacaagtgactgagacctagaaatccaagcgttggaggtcctgaggccagcctaagtcgcttcaaaatggaacgaaggcgtttgtggggttccattcagagccgatacatcagcatgagtgtgtggacaagcccacggagacttgtggagctggcagggcagagcctgctgaaggatgaggccctggccattgccgccctggagttgctgcccagggagctcttcccgccactcttcatggcagcctttgacgggagacacagccagaccctgaaggcaatggtgcaggcctggcccttcacctgcctccctctgggagtgctgatgaagggacaacatcttcacctggagaccttcaaagctgtgcttgatggacttgatgtgctccttgcccaggaggttcgccccaggaggtggaaacttcaagtgctggatttacggaagaactctcatcaggacttctggactgtatggtctggaaacagggccagtctgtactcatttccagagccagaagcagctcagcccatgacaaagaagcgaaaagtagatggtttgagcacagaggcagagcagcccttcattccagtagaggtgctcgtagacctgttcctcaaggaaggtgcctgtgatgaattgttctcctacctcattgagaaagtgaagcgaaagaaaaatgtactacgcctgtgctgtaagaagctgaagatttttgcaatgcccatgcaggatatcaagatgatcctgaaaatggtgcagctggactctattgaagatttggaagtgacttgtacctggaagctacccaccttggcgaaattttctccttacctgggccagatgattaatctgcgtagactcctcctctcccacatccatgcatcttcctacatttccccggagaaggaagagcagtatatcgcccagttcacctctcagttcctcagtctgcagtgcctgcaggctctctatgtggactctttatttttccttagaggccgcctggatcagttgctcaggcacgtgatgaaccccttggaaaccctctcaataactaactgccggctttcggaaggggatgtgatgcatctgtcccagagtcccagcgtcagtcagctaagtgtcctgagtctaagtggggtcatgctgaccgatgtaagtcccgagcccctccaagctctgctggagagagcctctgccaccctccaggacctggtctttgatgagtgtgggatcacggatgatcagctccttgccctcctgccttccctgagccactgctcccagcttacaaccttaagcttctacgggaattccatctccatatctgccttgcagagtctcctgcagcacctcatcgggctgagcaatctgacccacgtgctgtatcctgtccccctggagagttatgaggacatccatggtaccctccacctggagaggcttgcctatctgcatgccaggctcagggagttgctgtgtgagttggggcggcccagcatggtctggcttagtgccaacccctgtcctcactgtggggacagaaccttctatgacccggagcccatcctgtgcccctgtttcatgcctaactagctgggtgcacatatcaaatgcttcattctgcatacttggacactaaagccaggatgtgcatgcatcttgaagcaacaaagcagccacagtttcagacaaatgttcagtgtgagtgaggaaaacatgttcagtgaggaaaaaacattcagacaaatgttcagtgaggaaaaaaaggggaagttggggataggcagatgttgacttgaggagttaatgtgatctttggggagatacatcttatagagttagaaatagaatctgaatttctaaagggagattctggcttgggaagtacatgtaggagttaatccctgtgtagactgttgtaaagaaactgttgaaaataaagagaagcaatgtgaagcaaaaaaaaaaaaaaaaaa

SEQ ID NO: 132 - DNA, 591 bp, Homo sapiens
cagaacggccgatctccagcccaagatgattccagcagtggtcttgctcttactccttttggttgaacaagcagcggccctgggagagcctcagctctgctatatcctggatgccatcctgtttctgtatggaattgtcctcaccctcctctactgtcgactgaagatccaagtgcgaaaggcagctataaccagctatgagaaatcagatggtgtttacacgggcctgagcaccaggaaccaggagacttacgagactctgaagcatgagaaaccaccacagtagctttagaatagatgcggtcatattcttctttggcttctggttcttccagccctcatggttggcatcacatatgcctgcatgccattaacaccagctggccctacccctataatgatcctgtgtcctaaattaatatacaccagtggttcctcctccctgttaaagactaatgctcagatgctgtttacggatatttatattctagtctcactctcttgtcccacccttcttctcttccccattcccaactccagctaaaatatgggaagggagaacccccaataaaactgccatggactggactc

SEQ ID NO: 133 - DNA, 2981 bp, Homo sapiens
  modified_base (16)..(16): a, c, g, or t
  modified_base (50)..(50): a, c, g, or t
  modified_base (1286)..(1286): a, c, g, or t
  modified_base (1313)..(1314): a, c, g, or t
  modified_base (1319)..(1319): a, c, g, or t
  modified_base (1333)..(1333): a, c, g, or t
  modified_base (1348)..(1350): a, c, g, or t
  modified_base (1352)..(1352): a, c, g, or t
  modified_base (1354)..(1358): a, c, g, or t
  modified_base (1360)..(1362): a, c, g, or t
  modified_base (1364)..(1364): a, c, g, or t
  modified_base (2133)..(2133): a, c, g, or t
  modified_base (2740)..(2740): a, c, g, or t
  modified_base (2774)..(2778): a, c, g, or t
gaagacgctcagaggnattctgacaatatctttaccggagaagaggcaangtacgctcaaagccgaagccacagctcctcctgccgcatttctttcctgcttgcgaattccaagctgttaaataagatgtgcaaagggcttgcaggtctgccggcttcttgcttgaggagtgcaaaagatatgaaacatcggctaggtttcctgctgcaaaaatctgattcctgtgaacacaattcttcccacaacaagaaggacaaagtggttatttgccagagagtgagccaagaggaagtcaagaaatgggctgaatcactggaaaacctgattagtcatgaatgtgggctggcagctttcaaagctttcttgaagtctgaatatagtgaggagaatattgacttctggatcagctgtgaagagtacaagaaaatcaaatcaccatctaaactaagtcccaaggccaaaaagatctataatgaattcatctcagtccaggcaaccaaagaggtgaacctggattcttgcaccagggaagagacaagccggaacatgctagagcctacaataacctgctttgatgaggcccagaagaagattttcaacctgatggagaaggattcctaccgccgcttcctcaagtctcgattctatcttgatttggtcaacccgtccagctgtggggcagaaaagcagaaaggagccaagagttcagcagactgtgcttccctggtccctcagtgtgcctaattctcacctgaaggcagagggatgaaatgccaagactctatgctctggaaaacctgaggccaaatattgatctgtattaagctccagtgctttatccacattgtagcctaatattcatgctgcctgccatgtgtgagtcacttctacgcataaactagatatagcttttggtgtttgagtgttcatcagggtgggaccccattccagtccaattttcctaagtttctttgagggttccatgggagcaaatatctaaataatggcctggtaggtctggattttcaaagattgttggcagtttcctcctcccaacagttttacctcgggatggttggttagtgcatgtcacatgacatccacatgcacatgtattctgttggccagcacgttctccagactctagatgtttagatgaggttgagctatgatatgtgcttgtgtgtatgtctatgtgtatatattatatatacattagacacacatatacattatttctgtatatagatgtctgtgtatacatatgtatgtgtgagtgtatgtanacacacacacacacacacacacacttnngcaanagtgatgggaaagnccctaggtgctcatnnntngnnnnngnnnangtacttacatgggtgttttgatctctgttctttcatactacatttgaacagggcaaaatgaactaactgccatgtaggctaagaaagaaatgctaacctgtggaaagttggttttgtaaaattccatggatcttgctggagaagcatccaaggaacttcatgcttgatttgaccactgacagcctccaccttgagcactattctaaggagcaaataccttagctcccttgagctggttttctctgatggcacttttgagctcctaagctgccagccttcccttcttttcctgggtgctcagggcatgcttattagcagctgggttggtatggagttggcagacaggatgttcaacttaatgaagaaatacagctaaggccttgccagcaacacctgccgtaagttactggctgagtgagggcatagaagttaaaggttactgtttttatcctctatccttttttcctttcctgatcaaggtgctcttctcattttttcctgagaaccttagccatcagatgaggctccttagtttattgtggttggttgttttttctttataatggctctgggctatatgcccatatttataaaccagcagcaggggaaagattatattttataagagggaacaaattttcacaatttgaaaagcccacataagttttctcttttaaggtagaatcttgttaatttcattccaaacatcggggctaacagagactggaggcatttctttttaggctctgagactaaatgagaggaaaanaaaagaaaaaaaaatgattgtctaaccaattgtgagaattactgtttgaaacttttcaaggcacattgaaatacttgaaaacttctcatttatgttatttatgatgttattttgtacgtgttattattattatattgttttataaatggaggtacaggatatcacctgaattattaatgaatgcccaggaagtaattttcttctcattcttctaaaactactgcctttcaaagtgcacacacacgcgtccacatacactgcattcgttgctccagtataaattacatgcatgagcacctttctggcttttaagccaatataatgggctgcaaaatgaagacaccagagtgtatgcatacaaatctcactgtattaaagatgcaggttttctaattgtacccttcttgtctctctggcaatcttgcccttaatatccctggagttcctcatcagtgtcattttctgttatacacagttccacaattttgtctctagttgacttcaaatgtgtaactttattggtcttgccctattataattgtcatgactttcagattgtatctgaactcacagactgctgtcttactaataggtctggaaggtcacnctgaatgagaagtaaattattttatgtaatacannnnngagtgtgtttttcagttgtatttccctgttatttcatcactatttccaatggtgagcttgcctgctcatgctccctggacagaatactccttccttttgcatgcctgtttctatcatgtgcttgataggcctcaaagctaatgcttccagtgaaacacacgcatcttaataataagggtaaataaacgctccatatgaaacta

SEQ ID NO: 134 - DNA, 371 bp, Homo sapiens
ggacagaggaggactacgcgtgtccttgggcggagaagggaggtgactccggcggaagaggacaaggcagaatgcaggcccttcgggtgtcccaggcgctgatccgctccttcagctccaccgcccggaaccgctttcagaaccgagtgcgcgagaaacagaagctcttccaggaggacaatgacatcccgttgtacctgaagggcggcatcgttgacaacatcctgtaccgagtgacaatgacgctgtgtctgggcggcactgtctacagcttgtactcccttggctgggcctccttccccaggaattaagaccaagaagcctggggggcctgagagacttgaacaagtgtcaataaacgctggcctctg

SEQ ID NO: 135 - DNA, 1900 bp, Homo sapiens
acaactctcagaggagcattgcccgtcagacagcaactcagagaataaccagagaacaaccagattgaaacaatggaggatctttgtgtggcaaacacactctttgccctcaatttattcaagcatctggcaaaagcaagccccacccagaacctcttcctctccccatggagcatctcgtccaccatggccatggtctacatgggctccaggggcagcaccgaagaccagatggccaaggtgcttcagtttaatgaagtgggagccaatgcagttacccccatgactccagagaactttaccagctgtgggttcatgcagcagatccagaagggtagttatcctgatgcgattttgcaggcacaagctgcagataaaatccattcatccttccgctctctcagctctgcaatcaatgcatccacagggaattatttactggaaagtgtcaataagctgtttggtgagaagtctgcgagcttccgggaagaatatattcgactctgtcagaaatattactcctcagaaccccaggcagtagacttcctagaatgtgcagaagaagctagaaaaaagattaattcctgggtcaagactcaaaccaaaggcaaaatcccaaacttgttacctgaaggttctgtagatggggataccaggatggtcctggtgaatgctgtctacttcaaaggaaagtggaaaactccatttgagaagaaactaaatgggctttatcctttccgtgtaaactcggctcagcgcacacctgtacagatgatgtacttgcgtgaaaagctaaacattggatacatagaagacctaaaggctcagattctagaactcccatatgctggagatgttagcatgttcttgttgcttccagatgaaattgccgatgtgtccactggcttggagctgctggaaagtgaaataacctatgacaaactcaacaagtggaccagcaaagacaaaatggctgaagatgaagttgaggtatacataccccagttcaaattagaagagcattatgaactcagatccattctgagaagcatgggcatggaggacgccttcaacaagggacgggccaatttctcagggatgtcggagaggaatgacctgtttctttctgaagtgttccaccaagccatggtggatgtgaatgaggagggcactgaagcagccgctggcacaggaggtgttatgacagggagaactggacatggaggcccacagtttgtggcagatcatccttttctttttcttattatgcataagataaccaactgcattttatttttcggcagattttcctcaccctaaaactaagcgtgctgcttctgcaaaagatttttgtagatgagctgtgtgcctcagaattgctatttcaaattgccaaaaatttagagatgttttctacatatttctgctcttctgaacaacttctgctacccactaaataaaaacacagaaataattagacaattgtctattataacatgacaaccctattaatcatttggtcttctaaaatgggatcatgcccatttagattttccttactatcagtttatttttataacattaacttttactttgttatttattattttatataatggtgagtttttaaattattgctcactgcctatttaatgtagctaataaagttatagaagcagatgatctgttaatttcctatctaataaatgcctttaattgttctcataatgaagaataagtaggtaccctccatgcccttctgtaataaatatctggaaaaaacattaaacaataggcaaatatatgttatgtgcatttctagaaatacataacacatatatatgtctgtatcttatattcaattgcaagtatataataaataaacctgcttccaaacaac

SEQ ID NO: 136 - DNA, 2222 bp, Homo sapiens
gagtcccggcagtgcgggactccggtagccgcccctccggtagccgcccctcctccccccgcgccgccgccctatatgttgcccgccgcggcctctggggcatggagcacgctgcccagccctggcgatggcaacggcgacgggggtggcggaggagcgcctgctggccgcgctcgcctacctgcagtgcgccgtgggctgcgcggtcttcgcgcggaatcgtcagacgaactcagtgtacggccgccacgcgctgcccagccacaggctccgagtgccggcgcgggccgcctgggtggtgcaggagctgccctcgctggccctgccgctctaccagtacgccagcgagtccgccccgcgtctccgcagcgcgcccaactgcatcctcctggccatgttcctcgtccactacgggcatcggtgcttaatttacccgtttctgatgcgaggaggaaagcctatgccactgttggcatgtacaatggcgattatgttctgtacctgtaacggctatttgcaaagcagatacttgagccattgtgcagtgtatgctgatgactgggtaacagatccccgttttctaataggttttggcttgtggttaacaggcatgttgataaacatccattcagatcatatcctaaggaatctcagaaaaccaggagatactggatacaaaataccaaggggaggcttatttgaatacgtaactgcagccaactattttggagaaatcatggagtggtgtggctatgccctggccagctggtctgtccaaggcgcggcttttgctttcttcacgttttgttttttatctggtagagcaaaagagcatcatgagtggtacctccggaaatttgaagagtatccaaagttcagaaaaattataattccatttttgttttaagtgcgtttttcatgaaattatcttcaacttgaagctttccaatggcgcttctctatggactttgtaaataagttatatctttgtaattttcctgctactttatcattttcaagatgtcctctaggaattttttttctagtaattttgcaatctacctaataagtacctaaatacgctgaaatggaggttgaatatcctactgtgtaacaggtcagaatttcaagctctgggtaataactgctgatattttttctaatttcaaatttacctcttttggctatgtcttgccaagtgtgtatgagactagactttacaactgtctttgatggcattttcagaacaataaatgtcacaatcccttctatagccccctacagtgatctcttcaaggtcaactgcagtgttgcttccctccccctatagggctggaatctgtctaggagccctctctcggaggccatagaggctgggggtagccattgtgcagtcatggcccgggggaaacttgccaaccttcgtgtcaggtgctgtgtataagtggagaacttggggatagaggaggaagctcctcgtggcccttccaaggtgaggcaaaggcatctggacttgttccagcccagcccaccgggtgacatcaccgggcagggaggggtgctggtggtggttcatacggagtaagctgctctgcctgtgtgagtggctcctgggccctaaacaggcacctttaggccatgggtcactcaccgtgagccatcaatgtgctctggtctgacatggtttctctctgtcttctagtctagacctagtttttttgttctgttccccacgtatggatatagtagagattgttgtctgtgaaatttctcttttgtagattttgagttttcccttgtagtgtaaagaatgatcactttctgtaacaataacaagaccactttttaagatttatcctgtttgttctttgttgattgaaacataataattgttaaaattctctacagccttctttttcttccatagctaatcttccttctaatagtttttgctttctgttttgctgttgttgctttgcaaagctttcccctcatagcctgtacctgttatcaatataaaataatcttcctgttgaatgcttcatgacttgaattctactttgataaaaacattgccatactgctttttatcttgatgaattcatctggcattgctttgccttatcatctcatctggagtttttaaatgccatttgtttcagttgtctttaacaacataataaatagactttgccatttaaaaaaaaaaaaaaaaaaaaaaa

SEQ ID NO: 137 - DNA, 1443 bp, Homo sapiens
gtggctgcagcagcagcggcggcggaaaccctaaagtccgagtccggactacgagtgcgtggcctcctaatccggatcctagtcctgagcgtgtctgtgtgcgagtggacggtcccggacgcgatgaccctgaacggcggcggcagcggagcgggcgggagccgcggtgggggccaggagcgcgagcgccgtcggggcagcacaccctggggccccgccccgccgctgcaccgccgcagcatgccggtggacgagcgcgacctgcaggcggcgctgaccccgggtgccctgacggcggccgcggccgggacggggacccagggtcccaggctggactggcccgaggactccgaggactcgctcagctcagggggcagcgactcagacgagagcgtttacaaggtgctgctgctgggggcgcccggcgtgggcaagagcgccctggcgcgcatcttcggcggtgtggaggacgggcctgaagcagaggcagcagggcacacctatgatcgctccattgtagtggacggagaagaggcatcactcatggtctacgacatttgggagcaggacgggggccgctggttgcccggccactgcatggccatgggggatgcctatgtcattgtgtactcagtgacggacaagggcagcttcgagaaggcctcagaactgcgggtccagctgcggcgtgcacggcaaacagatgatgtgcccatcatcctcgtgggcaacaagagcgacctggtgcgctctcgtgaggtctcggtggatgagggccgggcctgcgcggtggtctttgactgcaagttcattgagacatcagcggcattgcaccacaatgtccaggcgctgtttgaaggtgtcgtgcgccagatacgcctgcgcagggacagcaaagaagccaacgcacgacggcaagcaggcacccggaggcgagagagccttggcaaaaaggcgaagcgcttcttgggccgcatcgtagctcgtaacagccgcaagatggcctttcgcgccaaatccaagtcctgccacgacctctcggttctctaggtcccacccgctcccactatggtgggagacgaacggaagggttggtgggctggcccagccaactgccccgggtgcctcagagcaggctcagactctgggtccctcggagctgccagccgggcacccccaacctcatggtcatggacagatagacagtgctgccctgcgaagtggctctcaggggccagtgagggctgggcccacagagatgcatgcgcaggctcatatgcgtcccaagcagccgcagcgcagccgccgggcaggcctgcgtgccgggagaggactctgccttttttcacagcccgggtgtgcctgccctggagggaggctcttcagtgcggtagctacttgtttacatgcagatttttgtaataaaggctatttcctgataaa

SEQ ID NO: 138 - DNA, 1443 bp, Homo sapiens; identical to SEQ ID NO: 137

SEQ ID NO: 139 - DNA, 1670 bp, Homo sapiens
attgagagtggctctaacaagtgccatttttccttgttagctttcatttctcagccctttacaagattaaaatagtctgcagtttaatctctccaaagctttacggacagtgattctgtcctaaacaagacagtgactccaggatttctgaagactattgtggaagaagcatccattaaggccaagctataacatcagaaatggtgaatgaatacaagaaaattcttttgctgaaaggatttgagctcatggatgattatcattttacatcaattaagtccttactggcctatgatttaggactaactacaaaaatgcaagaggaatacaacagaattaagattacagatttgatggaaaaaaagttccaaggcgttgcctgtctagacaaactaatagaacttgccaaagatatgccatcacttaaaaaccttgttaacaatcttcgaaaagagaagtcaaaagttgctaagaaaattaaaacacaagaaaaagctccagtgaaaaaaataaaccaggaagaagtgggtcttgcggcacctgcacccaccgcaagaaacaaactgacatcggaagcaagagggaggattcctgtagctcagaaaagaaaaactccaaacaaagaaaagactgaagccaaaaggaataaggtgtcccaagagcagagtaagcccccaggtccctcaggagccagcacatctgcagctgtggatcatcccccactaccccagacctcatcatcaactccatccaacacttcgtttactccgaatcaggaaacccaggcccaacggcaggtggatgcaagaagaaatgttccccaaaacgacccagtgacagtggtggtactgaaagcaacagcgccatttaaatacgagtccccagaaaatgggaaaagcacaatgtttcatgctacagtggccagtaagactcaatatttccatgtgaaagtcttcgacatcaacttgaaagagaaatttgtaaggaagaaggtcattaccatatctgattactctgaatgtaaaggagtaatggaaataaaggaagcatcatctgtgtctgactttaatcaaaattttgaggtcccaaacagaattatcgaaatagcaaataaaactcccaagatcagtcaactttacaagcaagcatctggaacaatggtgtatgggttgtttatgttacaaaagaaaagcgtacacaagaagaacacaatttatgaaatacaggataatacaggatccatggatgtagtggggagtggaaaatggcacaatatcaagtgtgagaaaggagataaacttcgactcttctgccttcaactgagaacagttgaccgcaagctgaaactggtgtgtggaagtcacagcttcatcaaggtcatcaaggccaagaaaaacaaggaaggaccaatgaatgttaattgaaatatgaaagctgaaatgcaacaaacaacttccgcttaaaacaattaagttgttaataactgtgattttgtaaatttcagtaattcatttaaatgatgtttcagtagatatattctagcatattaagagcttttataactgagttatagattagtttgctttctggaataaaattttcttcttatactcttccttttttttagatattacattttgcttttatgacattcacgaggcaaaaaaccg

SEQ ID NO: 140 - DNA, 787 bp, Homo sapiens
ctgaaggtcacccgggcggccccctcactgaccctccaaacgcccctgtcctcgccctgcctcctgccattcccggcctgagtctcagcatggcggatgggagcagcgatgcggctagggaacctcgccctgcaccagccccaatcagacgccgctcctccaactaccgcgcttatgccacggagccgcacgccaagaaaaaatctaagatctccgcctcgagaaaattgcagctgaagactctgctgctgcagattgcaaagcaagagctggagcgagaggcggaggagcggcgcggagagaaggggcgcgctctgagcacccgctgccagccgctggagttgaccgggctgggcttcgcggagctgcaggacttgtgccgacagctccacgcccgtgtggacaaggtggatgaagagagatacgacatagaggcaaaagtcaccaagaacatcacggagattgcagatctgactcagaagatctttgaccttcgaggcaagtttaagcggcccaccctgcggagagtgaggatctctgcagatgccatgatgcaggcgctgctgggggcccgggctaaggagtccctggacctgcgggcccacctcaagcaggtgaagaaggaggacaccgagaaggaaaaccgggaggtgggagactggcggaagaacatcgatgcactgagtggaatggagggccgcaagaaaaagtttgagagctgagccttcctgcctactgcccctgccctgaggagggccactgaggaataaagcttctctctgagctg

SEQ ID NO: 141 - DNA, 1599 bp, Homo sapiens
cactgcttattaaagtacactattcaggcatatcatgtaggtttactttctgtgtttctagagaccaagaagcgggacgttcaccatgggaagaaaatcgctgtaccttctgattgtggggatcctcatagcatattatatttatacgcctctcccagataacgttgaggagccatggagaatgatgtggataaacgcacatctgaaaactatacaaaatttggctacatttgtggagctccatgggagttccatttttatggattcctttaaggttgtcgggagctttgatgaagtcccaccaacctcagatgaaaatgtcactgtgactgagacaaaattcaacaacattcttgttcgggtatatgtgccaaagagaaagtctgaagcactaagaagggggttgttttacatccatggtggaggctggtgcgtgggaagtgctgctctaagtggttatgacttgctgtcaagatggacagcagacagacttgatgctgtcgtcgtatcaaccaactacagattagcacctaagtatcatttcccaattcaatttgaagatgtatataatgccttaaggtggttcttacgtaaaaaagttcttgcaaaatatggtgtgaaccctgagagaatcggtatttctggagatagtgcaggagggaatttagctgcagcagtgactcaacagctccttgatgacccagatgtcaagatcaaactcaagatccagtctttaatttatcctgcccttcagcctcttgatgtagatttaccgtcatatcaagaaaattcaaattttctatttctatccaaatcactcatggtcagattctggagtgaatattttaccactgatagatcacttgaaaaagccatgctttccagacaacatgtacctgtggaatcaagtcatctcttcaaatttattaattggagttccctgctccctgagaggtttataaaaggacatgtttataacaatccaaattatggcagttctgagctggctaaaaaatatccagggttcctagatgtgagggcagcccctttgttggctgatgacaacaaattacgtggcttacccctgacctatgtcatcacctgtcaatatgatctcttaagagatgatggactcatgtatgtcacccgacttcgcaacactggggttcaggtgactcataaccatgttgaggatggattccatggagcattttcatttctgggacttaaaattagtcacagacttataaatcagtatattgagtggctaaaggaaaatctatagtaaaacatgtagctataacatattttaaaaataaaatctgaaaacctcagaaaatttcgattagaaattggtctttcttagaatggtctagttaagttccacatgtagcataattcttaaataggcacttttctgttttttttttcttactgtgggatttcatttcaattttctacattgtctatctgctttttcggagattttccttcttacactgttaatcttattttaaaaaatattacattcttgtatactttatttttgtgagttggctactatttacgatgcaagagaataaatgtgagcaaagattg

SEQ ID NO: 142 - DNA, 787 bp, Homo sapiens; identical to SEQ ID NO: 140

SEQ ID NO: 143 - DNA, 1599 bp, Homo sapiens; identical to SEQ ID NO: 141

SEQ ID NO: 144 - DNA, 400 bp, Homo sapiens
ccactagccaagccgcgcgtccagttgcttgaagaagcccgttcaccgcctccagctgctgctctcctcgacatggaccctgagacctgcccctgcccttctggtggctcctgcacctgcgcggactcctgcaagtgcgagggatgcaaatgcacctcctgcaagaagagctgctgctcctgctgccctgcggagtgtgagaagtgtgccaaggactgtgtgtgcaaaggcggagaggcagctgaggcagaagcagagaagtgcagctgctgccagtgaaggcacccctccgtgtggagcactggagatagtgccaggtggctcagtgcccacctatgccctgtggtgaagtgttcctggtgttccctttccctgctgaccttggaggaatgacaataaa

SEQ ID NO: 145 - DNA, 4289 bp, Homo sapiens
gatcaatactgaggccgcgtcgacccccttgagccgagacccccccccagcccagcccccaccccaccccccgcacacgccccaccccccccacgacccagcctcataccgcaccagctgaggcacccaagaggattaccccctggggccctctcccgccccccaaaaaagagaagatcccctctcctggcccatcccttcccttcttccctcccccctccccccgaactttccctctcgcatgcttttcccctgcaccacggatcgcctctcggatgccgcttgcctggaagctgcgttaggagcgagcggcggcggtggcggcggtggcggcggcggcggcagctcgggagtgctatgaccggcaaactcgccgagaagctgccggtgaccatgagcagtttgctaaaccaactgcctgacaatctgtaccccgaggagatccccagcgcgctcaacctcttctccggcagcagcgactcggtagtccattacaatcagatggctacagagaatgtaatggacatcggtctgaccaacgagaagcccaacccggaactctcttactccggctccttccagccagcccccgggaacaagaccgtgacctacttgggaaagttcgccttcgactccccttccaactggtgccaggacaacatcattagcctcatgagcgccggcatcttgggggtgcccccggcttcaggggcgctaagcacgcagacgtccacggccagcatggtgcagccaccgcagggtgacgtggaggccatgtatcccgcgctacccccctactccaactgcggcgacctctactcagagcccgtgtctttccacgacccccagggcaatcccgggctcgcctattccccccaggattaccaatcggccaagccggcgttggacagcaatctcttccccatgattcctgactacaacctctaccaccaccccaacgacatgggctccattccggagcacaagcccttccagggcatggaccccatccgggtcaacccgccccctactacccctctggagaccatcaaggcattcaaagacaagcagatccacccgggctttggcagcctgccccagccgccgctcaccctcaagcccatccggccccgcaagtaccccaaccggcctagcaagacaccgctccacgaacggccccacgcgtgcccggccgagggctgcgaccgccgtttcagccgttcggacgagctgacccggcacctgcgcatccacacgggccacaagcccttccagtgccggatctgcatgcggagcttcagccgcagcgaccacctcaccactcacatccgcactcatacgggcgagaagccctttgcctgcgagttctgcgggcgcaagtttgcgcgcagcgacgagcgcaagcgccacgccaagatccacctcaagcaaaaggagaagaaggcggagaagggcggtgcaccctctgcatcctcggcgccccccgtgtcgctggcccccgtggtcaccacctgcgcctgaggatcgggcccccagatccccacttttcccctccagtgcctcccggctgctagcctgaaagcagcgggaaagccagccacggaggcgtaggggccgcgccctggcctctccatggacgtgcggccccttgcttccccttcgatgcccccggttcccaacctttcacgccggccagcggtcaggggccagggctggaggcgccttcccctcgcggtcccccacttagccaaggcgtgggggcggaaaggtggcgtctagcccgctttgttcagttcggatcgccttgatccaggggccgccgggccgcgccaaggacctgcaagggactgaaggcggagcccatccaaccctcgcccgacccaaacacctcattgtttcccccacgtctccctctataccccctcgaagactcgagagggggagggggtaaggagcgcaccaaagcgcagagcttgctgcccgccgcacgcacgcgcgcctgcgtgcggggatgcgcgcgagtgtgtgcgtgctcgcgtgtgtgtgtatgtgtgtgtgtgagtgtgtgtgtgtgcgcgcgcgcaagcgtgtgtgtttaagactcttgagctgaactgggctgtgtttaccccaaactcttccccacctcgggtccccaagccgctgggagatgtcccatgctgggggtccgcacgtggctggaggaggtggtcttccatccgctctgaaatcatgtttcttagagaaatgcctcggatgccgccgacgcggtgctgctgccgccgcttcgggtttggcccctcagaacccctccttttctgagcgcttccctcttaggcctcagggcagtttgatctgtggggagaaagagcagccatcgctgagcctgccttttaaaatatatgtgtatttccttagccccactctaagaaatctatgttcctgagtttgccccctgccctcccactccttccccttttcccctctaaaccttctcccatctctttcaaaatcttttcccagaaaggcaggcttcaaccagccactccagctttgtgtcttctctcaattacatagcaatttctccttcccaccatcatggggaagctggctctgcttttgccctttgtcatcaccaacacaacagatagaatttaaatataagtatatggtgtgcgtgtgtatgtatgtgtatgtatatgcatgcatgtgtataaagatgcacatgcgtacatatacataacatacacacaatatgtattcctagcaaaataaaatctctaaggtacttggttatccagtgcagtgcaccggaataaagagaatttgtaggcgtatacagctttaaatgatttattttttatgaaaatgttaactgatgagattatatctacatacgtgtgttatgtgtgtggatatagatgcacacatatctgtacatatacatgtgagtgtacatatatacacatatacacatctatgtatggatatgtgtgtatacacatatacacatctctgtccaaaatttcctcaaagatatggggattttttcatgaatccatgtggatgaatgaggtgtctcctttccatacccagtctcaccttctccccaccctacctcacctcttctcaggcacccctcttccccagctgtcctgccagcccttctcgtacagggtggctcctttgaagtggagtaatagggaaggttgctctctgccacagcttgcagcatggtcttgactgaatgtactgttcctgttagcgttacttctcctgtggtcagtaagttgcccagagagaaggaacaaaggtctggagtttacagaatgtctgtttttaaagtcactttatgcgttttccacttttttcttttttaagaaaaagaagtaccatttttgttttgttttgttttgatttttggtggtggataaataatactaaaaggactctagtggaaaggggggatatcgaagagcagggggttgtgaatttccaggtacttggactttttgtagaagtagagagaagaagatgaagtttgccaggagggcccatattttttcagctgaagggtaaaatctttctttgcagagacagtattttgctgaatactttttataatgtgatgattattaaaaaagcaaaaattttggtcacttccaagctagaaggaggaatcagataccctttaatattttttcctcgctccttctggtatatgcatgtcactgcatgataattgagttttcctttgttttaataaaactgttctcagacattaagctaaactaagagaaaaataactttgttgccaaaaggttgtgctatccagattttttatatgtctgcatgtttaaaaaaaaaaaagcaacaaaagaaaatgcactctaacttatgtgaactgagagaaaaaaatcaggttttaaacaggaaaacctatggggaatgatattttttgaaagacttttgtataaagttgagtacttagaaaaaagacaaaccagatgtaatatattttgtggatgtttttatttcttggatttatagtaccttatactaaggttaaaaaaatatgcttgatattgtgaaaaggtgaaattcttcaccaacatttcatttgctcctttgtcatattgtaatgccaatataatatagttaatgaaaacagcatttttaaaaaccgaaatattgaaatggtgtaatgttgtaccatttgcactgtgagcaaatgctaatacagtaaatatattgtgtttgctgacaatcaaaaaaaaaaaaaaaaaaaa

SEQ ID NO: 146 - DNA, 1837 bp, Homo sapiens
ctcaaactcagctcacttgagagtctcctcccgccagctgtggaaagaactttgcgtctctccagcaatgcatctccttgcgattctgttttgtgctctctggtctgcagtgttggccgagaactcggatgattatgatctcatgtatgtgaatttggacaacgaaatagacaatggactccatcccactgaggaccccacgccgtgcgactgcggtcaggagcactcggaatgggacaagctcttcatcatgctggagaactcgcagatgagagagcgcatgctgctgcaagccacggacgacgtcctgcggggcgagctgcagaggctgcgggaggagctgggccggctcgcggaaagcctggcgaggccgtgcgcgccgggggctcccgcagaggccaggctgaccagtgctctggacgagctgctgcaggcgacccgcgacgcgggccgcaggctggcgcgtatggagggcgcggaggcgcagcgcccagaggaggcggggcgcgccctggccgcggtgctagaggagctgcggcagacgcgagccgacctgcacgcggtgcagggctgggctgcccggagctggctgccggcaggttgtgaaacagctattttattcccaatgcgttccaagaagatttttggaagcgtgcatccagtgagaccaatgaggcttgagtcttttagtgcctgcatttgggtcaaagccacagatgtattaaacaaaaccatcctgttttcctatggcacaaagaggaatccatatgaaatccagctgtatctcagctaccaatccatagtgtttgtggtgggtggagaggagaacaaactggttgctgaagccatggtttccctgggaaggtggacccacctgtgcggcacctggaattcagaggaagggctcacatccttgtgggtaaatggtgaactggcggctaccactgttgagatggccacaggtcacattgttcctgagggaggaatcctgcagattggccaagaaaagaatggctgctgtgtgggtggtggctttgatgaaacattagccttctctgggagactcacaggcttcaatatctgggatagtgttcttagcaatgaagagataagagagaccggaggagcagagtcttgtcacatccgggggaatattgttgggtggggagtcacagagatccagccacatggaggagctcagtatgtttcataaatgttgtgaaactccacttgaagccaaagaaagaaactcacacttaaaacacatgccagttgggaaggtctgaaaactcagtgcataataggaacacttgagactaatgaaagagagagttgagaccaatctttatttgtactggccaaatactgaataaacagttgaaggaaagacattggaaaaagcttttgaggataatgttactagactttatgccatggtgctttcagtttaatgctgtgtctctgtcagataaactctcaaataattaaaaaggactgtattgttgaacagagggacaattgttttacttttctttggttaattttgttttggccagagatgaattttacattggaagaataacaaaataagatttgttgtccattgttcattgttattggtatgtaccttattacaaaaaaaatgatgaaaacatatttatactacaaggtgacttaacaactataaatgtagtttatgtgttataatcgaatgtcacgtttttgagaagatagtcatataagttatattgcaaaagggatttgtattaatttaagactatttttgtaaagctctactgtaaataaaatattttataaaactaaaaaaaaaaaaaaa

SEQ ID NO: 147 - DNA, 1062 bp, Homo sapiens
gctctgttctacagcacactaccagaagacagcagaaatgaaaagcatttactttgtggctgggttatttgtaatgctggtacaaggcagctggcaacgttcccttcaagacacagaggagaaatccagatcattctcagcttcccaggcagacccactcagtgatcctgatcagatgaacgaggacaagcgccattcacagggcacattcaccagtgactacagcaagtatctggactccaggcgtgcccaagattttgtgcagtggttgatgaataccaagaggaacaggaataacattgccaaacgtcacgatgaatttgagagacatgctgaagggacctttaccagtgatgtaagttcttatttggaaggccaagctgccaaggaattcattgcttggctggtgaaaggccgaggaaggcgagatttcccagaagaggtcgccattgttgaagaacttggccgcagacatgctgatggttctttctctgatgagatgaacaccattcttgataatcttgccgccagggactttataaactggttgattcagaccaaaatcactgacaggaaataactatatcactattcaagatcatcttcacaacatcacctgctagccacgtgggatgtttgaaatgttaagtcctgtaaatttaagaggtgtattctgaggccacattgctttgcatgccaataaataaattttcttttagtgttgtgtagccaaaaattacaaatggaataaagttttatcaaaatattgctaaaatatcagctttaaaatatgaaagtgctagattctgttattttcttcttattttggatgaagtaccccaacctgtttacatttagcgataaaattatttttctatgatataatttgtaaatgtaaattattccgatctgacatatctgcattataataataggagaatagaagaactggtagccacagtggtgaaattggaaagagaactttcttcctgaaacctttgtcttaaaaatactcagctttcaatgtatcaaagatacaattaaataaaattttcaagcttc

SEQ ID NO: 148 - DNA, 3003 bp, Homo sapiens
cgaagtcaagacgtctggaaagaattacccagtcctggcttcgagcagcccattgaaccagagacttgaaacagccccagccaaagacttttctcccaattctgcgcttcctgggttctgctgagtcttccacaggctttttttttttttttttttttttaagacgaaaaagagattttctgttatcgggggcagaaagactgaagcacaaaaaaaaaaaaaaagaaaagaaaagaaaagaaaaaagaaaagttaatttatttttaaagcataatttttttaagaattagactgaagtgcaacggaaacataaagagaatattagtgaaattattttttaaagtggggaagaatcaaacatttaagactcccctatcctttttaaatgttgtttttaaatttcttattttttttggccggtcgtctcaaattcatctgatctcttattacctcaattttggaaactgcccgccaccgaccctccgggaccacacagacaggctgaggacgactttatgaccaagagctgaacaagatgcattgtgagaggtttctatgtatcctgagaataattggaaccacactctttggagtctctctcctccttggaatcacagctgcttatattgttggctaccagtttatccaaacggataattactatttctcttttggactgtatggtgcctttttggcatcacacctcatcatccaaagcctgtttgcctttttggagcaccgaaaaatgaaaaaatccctagaaacccccataaagttgaacaaaacagttgccctttgcatcgctgcctatcaagaagatccagactacttaaggaaatgtttgcaatctgtgaaaaggctaacctaccctgggattaaagttgtcatggtcatagatgggaactcagaagatgacctttacatgatggacatcttcagtgaagtcatgggcagagacaaatcagccacttatatctggaagaacaacttccacgaaaagggtcccggtgagacagatgagtcacataaagaaagctcgcaacacgtaacgcaattggtcttgtccaacaaaagtatctgcatcatgcaaaaatggggtggaaaaagagaagtcatgtacacagccttcagagcactgggacgaagtgtggattatgtacaggtttgtgattcagacactatgcttgacccagcctcatctgtggagatggtaaaagttttagaagaagatcccatggttggaggtgttgggggagatgtccagattttaaacaagtacgattcctggatctcattcctcagcagtgtaagatattggatggcttttaatatagaaagggcctgtcagtcttattttgggtgtgttcagtgcattagtggacctctgggaatgtacagaaactccttgttgcatgagtttgtggaagattggtacaatcaagaatttatgggcaaccaatgtagctttggtgatgacaggcatctcacgaaccgggtgctgagcctgggctatgcaacaaaatacacagctcgatctaagtgccttactgaaacacctatagagtatctcagatggctaaaccagcagacccgttggagcaagtcctacttccgagaatggctgtacaatgcaatgtggtttcacaaacatcacttgtggatgacctacgaagcgattatcactggattctttcctttctttctcattgccacagtaatccagctcttctaccggggtaaaatttggaacattctcctcttcttgttaactgtccagctagtaggtctcataaaatcatcttttgccagctgccttagaggaaatatcgtcatggtcttcatgtctctctactcagtgttatacatgtcgagtttacttcccgccaagatgtttgcaattgcaacaataaacaaagctgggtggggcacatcaggaaggaaaaccattgttgttaatttcataggactcattccagtatcagtttggtttacaatcctcctgggtggtgtgattttcaccatttataaggagtctaaaaggccattttcagaatccaaacagacagttctaattgttggaacgttgctctatgcatgctattgggtcatgcttttgacgctgtatgtagttctcatcaataagtgtggcaggcggaagaagggacaacaatatgacatggtgcttgatgtatgatcttccatgttttgacgtttgcagtcacacacaacaccttagttcctctaggggctgtacagtattgtggcatcagataatgccaccaaaggagacatatcactgctgctgggacttgaacaaagacatttatatgggtttattttcattctgccaaagtaaaacaatacatcaacaagaagaaactcagatttaacctgttatttctatgaaaatgggatgaattctttgtttatgcactttttccttactgtgcatccgcctgaaagtgttttggcctatatacctcactagccatgctttatgtgggttatcatggaagaaaaggattttggaaactcaaggaaaagttctttcaacctatacaacctaacttatggactgtttgatagatgataattttttttttttaggaaggattttctttttaactttaccaaatgaaatgccaaaggaagttttaaaggccgtggctgtgctgtatttgatataattgtactgtgtttttaaattgtgtatgccaatcttaaagacaaattttgcatattctctattttacttttctgccaaaataaacctgttcttccttttttaaaataaaataagttcttaaaaaatttatacttaaaaaatcctgcccaaaatgtgaagcttggttgactgatgttcatgatagaaagaataaaatgtttctctctctctaccttttaaaattgaatagtttatttctgtgaaagaagtatttaaactttcaatattttaactttttgtttttatttcttttagaaaaggccaatatacctatcgcg

SEQ ID NO: 149 - DNA, 1567 bp, Homo sapiens
gattcacatccattggtcaggggcaaataccactagctctgcatcctcagtcactttgtgccatttcatcaggtcagagccaaaggaaagcttgaaaaatgaagacattagcaggacttgttctgggacttgtcatcttggatgctgctgtgactgccccaactctagagtccatcaactatgactcagaaacctatgatgccaccttagaagacctggataatttgtacaactatgaaaacatacctgttgataaagttgagattgaaatagccacagtaatgccttcagggaacagagagctcctcactccacccccacagcctgagaaggcccaggaagaggaagaggaggaggaatctactcccaggctgattgatggctcttctccccaggagcctgaattcacaggggttctggggccacacacaaatgaagactttccaacctgtctttggtgtacttgtataagtaccaccgtgtactgtgatgaccatgaacttgatgctattcctccgctgccaaagaacaccgcttatttctattcccgctttaacagaattaaaaagatcaacaaaaatgactttgcaagcctaagtgatttaaaaaggattgatctgacatcaaatttaatatctgagattgatgaagatgcattccgaaaactgcctcaacttcgagagcttgtcctgcgtgacaacaaaataaggcagctcccagaattgccaaccacttcgacatttattgatattagcaacaatagacttggaaggaaagggataaagcaagaagcatttaaagacatgtatgatctccatcatctgtacctcactgataacaacttggaccacatccctctgccactcccagaaaatctacgagcccttcacctccagaataacaacattctggaaatgcacgaagatacgttctgcaatggtaaaaatttgacttatattcgtaaggcactagaggacattcgattggatggaaaccctattaatctcagcaaaactccacaagcatacatgtgtctacctcgtctgcctgttgggagccttgtctaatttcagataatggttagcattacgatggctactataaataaaccattcttactgctctcttccaaaacaaaactcagcatgatactttgagattgtgttctgagagatgatatgactacataaaatacaattaaaaatgttataatataatgaaaatgtagtaatttaagaaaacaccagatgagttaggaataaacctataacatttacaaaaagagcaaaactaagtgatagaaaatatttcacacatgttcttatagatcatgtatcacttgcaagttttaggagttcatatcctatatcatttcaaattaagtacataataaagtaaaattttgaaatgaacactttaggtatttttgccaagatttagatgtttttaattaaacttttctcttcctttttttttcactaaggcatgtttattcccctaatccattaaagagcatgaaaaaaagaataaatgtatttgaaaaaaaaaaaaaaaaaaaaaaaaaaaa

SEQ ID NO: 150 - DNA, 2490 bp, Homo sapiens
accagttcgcgccggcggtagacgaggacgccaacagcagcggagaaacgtttctctttcctctcagtttgcgcacaccatggcggcccctgcccagcagactactcagcctggcggcgggaagcgcaaaggcaaggctcagtatgtgctggccaagcgcgctcggcgctgcgacgctggcgggccccgtcagctagagcccgggctacagggcatcctcatcacctgcaatatgaacgagcgcaagtgcgtggaggaggcctacagcctcctcaacgaatacggcgacgacatgtatgggccagaaaagtttacagacaaggatcagcggccctctggaagtgagggagaggatgatgatgcggaggctgccttgaagaaagaagttggtgacattaaggcatctacagagatgaggttaagaagattccagtcagtggaaagtggagcaaataacgttgtcttcatcaggacacttgggatagagcctgagaaattggtgcatcatattctccaggatatgtacaaaaccaagaaaaagaagactcgagttattttgcgaatgttacccatctcaggcacatgcaaggcttttttagaagatatgaaaaaatatgcagaaacatttttggaaccctggtttaaagctccaaacaaagggacatttcagattgtgtacaaatctcgaaataacagtcatgtgaatagagaagaagttatcagagaattggcaggaatagtgtgcaccctcaattcagaaaataaagtggatctcaccaatccacagtacacagtggtagtagaaatcatcaaagctgtctgttgcctgagtgttgtgaaagattacatgttgtttagaaaatacaatctccaggaggtggtgaagagccctaaggatccgtcacagcttaactcaaagcagggaaatggggaagaagctaaactggaatctgcggacaaatcagaccaaaacaacacagcagaaggaaaaaataaccagcaggtaccagagaatactgaggagctggggcagacaaaaccaacgtctaatccacaggtggtaaatgagggaggagccaaacctgaacttgcaagtcaagccacagaaggatccaagtcaaatgaaaatgactcctcataggaagtcatttggtgttggaggtgggtttctcacctggggctctacgagatgttgctggggctccaccttaaattgtgactaaaaacagttttttatttgtgtgctgcactatgctgttctcacagtagtgagcaatgattgcgcagccctgttaacagtttttttagggatctttcagcctttatggtattacgtagaggcagacccatgtgctgctgttgcaaagaggggaggataggagggggatgttggcctctcccaggctcctcttctgcagtgccagctgacttaagggagtgaactacctgtgaagtagaaaatcagagggaagttttcattctaaggaaggagtttttacatgccacagctcagctgtctgcctgccactttgttgtaaacattgcaaaaatgtggatcatgtaggttagaagtgaattgtttagtgaagtttttgtacttttgtgattttcttgtttatgtctgtttttttttttttttttaacatttgtgtgtaatatagctgacagtccagtgtcgcaattttggaaggcaagatgtgagagagacgagaaccattttaggcatagaactacagacatttctgaaaaggttggtgatgaagaacttcagtcttctgagtatacttcagtatactagtgcaacaagggacacaaagaaattctgtcttaataaagaaagctacttctcaagggtattatgtggactcagtccaagctctcctgtcccattgtgcattgtctgtgacatgcaacttacaaaactagcaattgtaacaataaatcacagccacttgacaagaaaggatattcattattttcaaatggcttttggactatcaaaaacagtaaggcttttgttcagaaatcacctttagtcaaaaggtttaagaagcaaattatttagtagcagaacttatctcaggaaaggaaaatatgcatggttggtgagaatctaataacattaaaatgctggggcaagatgcagtacaagttgaagagactttattctcaataagttgatttactgatgatatgtcatatgatgcaaaaaaggttttgtgtcattaactgaaaagtagcagcttctctatccaggatgatgagtcaacaggtttcactaatatttgtcatgctgtagcatttgtaagatttgtaaatgatgaaattcaaagaaaactttttctattgctaggagcctgccagaacaaggccaatatataatgttgtgacatcatatctgataaccagaggtctggtatctacactcctggtgccccatcagtggttgtctccataagtcattttgcgttaaaaaaaaaaaaaaaaaaa

SEQ ID NO: 151 - DNA, 1719 bp, Homo sapiens
ccgaattcgggggcagcagccacattggcagtgaggccgtggcagcgtcagcagcagaggatgccccaggccctggagcgtgcagatggcagctgggcctgggtggtgctgctggccaccatggtgacccagggcctcaccctgggcttccccacgtgtatcggcatcttcttcactgaactgcaatgggagttccaggccagcaacagcgagacctcttggttcccctccatcctcacggctgtgctccacatggcagggcccctgtgcagcatcctggtgggacgcttcggctgccgagtgaccgtgatgctggggggcgtgctggccagcctgggcatggtggccagctccttctctcacaacctcagccagctctacttcacagcaggattcatcacaggcctgggcatgtgcttcagcttccagtcaagcatcacggtgctgggcttctactttgtccgccggcgggtgctggccaacgcgctggcctcgatgggcgtctccctgggcatcaccctctggccgctgctctcccgttaccttctggagaacctgggctggaggggtaccttccttgtcttcggcgggatctttctccactgctgcatctgcggggccatcataaggcctgtggccaccagtgtggcccctgagaccaaagaatgtcccccgccacctcccgagacacctgcacttggctgcctggctgcatgcggccggaccatccagcgccacctggccttcgacatcctgcggcacaacacaggctactgcgtgtacatactgggtgtgatgtggtccgtcctgggcttcccactgccacaagtcttcctggtgccatatgccatgtggcacagcgtggacgagcagcaggcagccctcctcatctccatcatcggcttcagcaacatcttcctgaggcccctagccgggctgatggcaggacggccggcctttgctagccaccgcaagtacctgttcagcctggcactcctgctcaatgggctcactaacctggtgtgtgcggcatcaggtgacttctgggtgctcgtgggctactgcctggcgtacagcgtgtccatgagtggcatcggcgccctcatcttccaggttctcatggacatcgtccccatggatcagttccccagagccctgggactcttcactgtcctggacggccttgctttcctcatctccccaccactggccgggttgctcctggacgccaccaacaactttagctatgttttctacatgtccagcttcttcctcatctcagctgccctcttcatgggtggcagcttctacgccctgcagaagaaggagcaaggcaagcaggctgtcgcggcggatgccctggagcgggatcttttcttggaagccaaagacggtcctgggaagcaacggtcccctgagatcatgtgccagtcttcccgccagccacgtccagctggcgtcaataagcatctttggggatgtcctgcctcctccaggaccagccatgagtggctcttatggccaaaggcggtactgcaggccaagcaaacggctctgggctggaatagccctacctgagtgccctgtttgactccgccactatctgccatgtgagttgggcaaattgttgaccacctctgagccttgaaaaagtaggaggttactttgttagagcaaaataataaaatttaattttaaaaaagaaaaaaaaaaaaaaaa

SEQ ID NO: 152 - DNA, 1123 bp, Homo sapiens
ccgagggccattgagtggcgatggcggcgacggcgagtgccggggccggcgggatggacgggaagccccgtacctcccctaagtccgtcaagttcctgtttgggggcctggccgggatgggagctacagtttttgtccagcccctggacctggtgaagaaccggatgcagttgagcggggaaggggccaagactcgagagtacaaaaccagcttccatgccctcaccagtatcctgaaggcagaaggcctgaggggcatttacactgggctgtcggctggcctgctgcgtcaggccacctacaccactacccgccttggcatctataccgtgctgtttgagcgcctgactggggctgatggtactccccctggctttctgctgaaggctgtgattggcatgaccgcaggtgccactggtgcctttgtgggaacaccagccgaagtggctcttatccgcatgactgccgatggccggcttccagctgaccagcgccgtggctacaaaaatgtgtttaacgccctgattcgaatcacccgggaagagggtgtcctcacactgtggcggggctgcatccctaccatggctcgggccgtcgtcgtcaatgctgcccagctcgcctcctactcccaatccaagcagttcttactggactcaggctacttctctgacaacatcctgtgccacttctgtgccagcatgatcagcggtcttgtcaccactgctgcctccatgcctgtggacattgccaagacccgaatccagaacatgcggatgattgatgggaagccggaatacaagaacgggctggacgtgctgttcaaagttgtccgctacgagggcttcttcagcctgtggaagggcttcacgccgtactatgcccgcctgggcccccacaccgtcctcaccttcatcttcttggagcagatgaacaaggcctacaagcgtctcttcctcagtggctgaagcgtttcagggcacacaggacagcagaagatcccctttgtcagtggggaaaccaaggcagagctgaggggacagggaggagcagaagccatcaagatggtcaaagggcctgcagagggagatgtggccttcctccccctcattgaggactcaataaa

SEQ ID NO: 153 - DNA, 1375 bp, Homo sapiens
tcgaattccggaagccgctcccgacaccctttgcctggctctgtccatattagttcccaggcggccgtcgcgttccagcagcggcacgcagcgcaggcggagcggcagcggggcctcggctctatagagccgagccgctggtacccgcccggtaccgcgcgagccagtgcccctggatcttgcctctgctccgacgccgttccccaccagttagcgacagcgcccgcccctctgaggagacacgaaggtggttccccagccgctcaaatttccggaccaccgcgctttcccctcctcagcctgggctgtgctctctctagaatcctcgggcccccactttcttcccaaactcatcctaaatctctcacacacgcgagtgttcccagccctcaagccagctgctcctcctccgttcattttctgcccctcttcgcaaagcacccccgggatcatcctccgagggcgactttttgagaaatctcggtggagtagtggaccagagcaggggagtttttaaaagccggggcgcgagaaacaggaaggtactatggcttcctcgtctggcaacgatgatgatctcactatccccagagctgctatcaataaaatgatcaaagagactcttcctaatgtccgggtggccaacgatgctcgagagctggtggtgaactgctgcactgaattcattcaccttatatcttctgaagccaatgagatttgtaacaaatcggaaaagaagaccatctcaccagagcatgtcatacaagcactagaaagtttgggatttggctcttacatcagtgaagtaaaagaagtcttgcaagagtgtaaaacagtagcattaaaaagaagaaaggccagttctcgtttggaaaaccttggcattcctgaagaagagttattgagacagcaacaagaattatttgcaaaagctagacagcaacaagcagaattggcccaacaggaatggcttcaaatgcagcaagctgcccaacaagcccagcttgctgctgcctcagccagtgcatctaatcaggcgggatcttctcaggatgaagaagatgatgatgatatctgaaattcaccagctgagtttctatttcttctataaatgtttttccctgcacaacaaaaacagtgaaagaaatgcttatctgtaattttgtatgcatcttggtggacttgtcattggtattctagagatgtctgctataagtttcatctgttgtgtgctatacatgtaaaaactgtctctttgaactattgaaaatttaaggttcagtataatatcaattttgaatttttcctggtgtttatgaaattttagatagcagcaagtcttcgtttgatcataaacagtgtacagataactcaa

SEQ ID NO: 154 - DNA, 2169 bp, Homo sapiens
ccgcggctccccgactcctttcccagaggtgagtgcccgaagccaggagcccggggcgcctaggtctgtgcgctgcggggaacccctaccgccagcctccccgccacccgcgcgcccccaagcccagcgggcgaggccccgggcgccccacagccggcgccgcgccatgctccaccttagcgagttttccgaacccgacgcgctcctcgtcaagtccactgaaggctgttgcgccgaacccagcgctgaattgccccggctgcctgccagggacgctcccgcggccaccggctaccctggagcaggcgacttcttgagctgggctttgaacagctgcggcgcaagtggggacttagccgactcctgcttcctggaggggcctgcgcccacaccccctcccggcctcagctacagcggtagcttcttcattcaggcagtgcccgaacacccgcacgacccggaggcactcttcaacctcatgtcgggcgtcttaggcctggcacccttccccggtccagaggcagcagcgtccagatccccgctggatgccccttttcctgcggggtccgatgccttgctgccgggtccgccggacctttactccccggatctgggcgctgcccctttcccagaggcgttctgggaggcctcgccttgcgcgggtgccccctcgcagtgcctgtatgagcctcagctctccccgcccgacgtcaagcccggcctccggcggcctcccgcctcgccagcgctggacgctgtctctgccttcaagggtccctacgcgccctgggagctgctttctgtgggggccccagggaactgtgggtcacagggagactaccaggccgccccggaggctcgttttcccgtaatagggaccaagattgaggacttgctgtccatcagctgccctgcggaactgccggccgtcccagccaacagactctatcccagcggggcctatgacgctttcccgctggccccgggtgacttaggggagggggctgagggcctccctgggctcctgacccctcctagtggggagggagggagtagcggcgacggcggagagtttctggccagtacgcagcctcagctttccccgctgggccttcgcagcgccgccgcggcggacttccctaaacctctggtggcggacatccctggaagcagtggcgtggctgcaccacccgtgccgccgccgccgcccacccctttcccccaggccaaggcgcgacgcaaggggcgccgcggcggcaaatgcagcacgcgctgcttctgcccgcggccgcacgccaaggccttcgcttgcccggtggagagttgtgtgcggagctttgcgcgctccgacgagctcaatcgccacctgcgcatccacacgggccacaaacccttccagtgccgcatctgcctccgcaacttcagccgcagcgaccacctcaccacgcacgtgcgcacccacaccggcgagaagccttttgcttgcgacgtgtgcggccgccgcttcgcgcgcagcgatgagaagaaacggcacagcaaggtgcacctcaagcagaaggcgcgcgccgaggagcggctcaagggcctcggcttttactcgctgggcctctccttcgcttctctctgagcaagagatgggtttatgggttggggcgccgccgttcggcgcgcacgagttccgggccgttcccctccccgctcttcttccaactcctcctcgcacgcccgagggccggcctccgtcccgcttccagtttccttgaagcgcccgccgcacacgccctattcagcaccagctcgccggacagttcccgcggtccaggcgctgtcacccttgtcagccgcgctttgggggaagtcttctgagaccacccagtgaataggcactaccctgggattcaagacagtcttttgtaactgcacacgccccacgccttcctctataacccccagagacaggctggggcaggccaaggcggtctcgcgcgggactttgtacagcagtgtcttatccagcagccgattggatgtaacgttttgctttgggttttttttccttttgttgttgttaatttttgtaaagcagacgctactctcaagcagttgacaaaactgtttatttttgcaattaaaattattgtgctaaaaaaaaaaaaaaaaaaaaaaaaa

SEQ ID NO: 155 - DNA, 2186 bp, Homo sapiens
acacggaccaaggagtctaacacgtgcgcgagtcgggggctcgcacgaaagccgccgtggcgcaatgaaggtgaaggccggcgcgctcgccggccgaggtgggatcccgaggcctctccagtccgccgagggcgcaccaccggcccgtctcgcccgccgcgccggggaggtggagcacgagcgcacgtgttaggacccgaaagatggtgaactatgcctgggcagggcgaagccagaggaaactctggtggaggtccgtagcggtcctgacgtgcaaatcggtcgtccgacctgggtataggggcgggctccaggcgaggcggtcgacgctcctgaaaacttgcgcgcgcgctcgcgccactgcgcccggagcgatgaagatggtcgcgccctggacgcggttctactccaacagctgctgcttgtgctgccatgtccgcaccggcaccatcctgctcggcgtctggtatctgatcatcaatgctgtggtactgttgattttattgagtgccctggctgatccggatcagtataacttttcaagttctgaactgggaggtgactttgagttcatggatgatgccaacatgtgcattgccattgcgatttctcttctcatgatcctgatatgtgctatggctacttacggagcgtacaagcaacgcgcagcctggatcatcccattcttctgttaccagatctttgactttgccctgaacatgttggttgcaatcactgtgcttatttatccaaactccattcaggaatacatacggcaactgcctcctaattttccctacagagatgatgtcatgtcagtgaatcctacctgtttggtccttattattcttctgtttattagcattatcttgacttttaagggttacttgattagctgtgtttggaactgctaccgatacatcaatggtaggaactcctctgatgtcctggtttatgttaccagcaatgacactacggtgctgctacccccgtatgatgatgccactgtgaatggtgctgccaaggagccaccgccaccttacgtgtctgcctaagccttcaagtgggcggagctgagggcagcagcttgactttgcagacatctgagcaatagttctgttatttcacttttgccatgagcctctctgagcttgtttgttgctgaaatgctactttttaaaatttagatgttagattgaaaactgtagttttcaacatatgctttgctagaacactgtgatagattaactgtagaattcttcctgtacgattggggatataatgggcttcactaaccttccctaggcattgaaacttcccccaaatctgatggacctagaagtctgcttttgtacctgctgggccccaaagttgggcatttttctctctgttccctctcttttgaaaatgtaaaataaaaccaaaaatagacaactttttcttcagccattccagcatagagaacaaaaccttatggaaacaggaatgtcaattgtgtaatcattgttctaattaggtaaatagaagtccttatgtatgtgttacaagaatttcccccacaacatcctttatgactgaagttcaatgacagtttgtgtttgggtggtaaaggattttctccatggcctgaattaagaccattagaaagcaccaggccgtgggagcagtgaccatctgctgactgttcttgtggatcttgtgtccagggacatggggtgacatgcctcgtatgtgttagagggtggaatggatgtgtttggcgctgcatgggatctggtgcccctcttctcctggattcacatccccacccagggcccgcttttactaagtgttctgccctagattggttcaaggaggtcatccaactgactttatcaagtggaattgggatatatttgatatacttctgcctaacaacatggaaaagggttttcttttccctgcaagctacatcctactgctttgaacttccaagtatgtctagtcaccttttaaaatgtaaacattttcagaaaaatgaggattgccttccttgtatgcgctttttaccttgactacctgaattgcaagggatttttatatattcatatgttacaaagtcagcaactctcctgttggttcattattgaatgtgctgtaaattaagttgtttgcaattaaaacaaggtttgcccacaaaaaaaaaa

SEQ ID NO: 156 - DNA, 8992 bp, Homo sapiens; identical to SEQ ID NO: 10

SEQ ID NO: 157 - DNA, 667 bp, Homo sapiens; identical to SEQ ID NO: 11

SEQ ID NO: 158 - DNA, 5316 bp, Homo sapiens; identical to SEQ ID NO: 12

SEQ ID NO: 159 - DNA, 972 bp, Homo sapiens; identical to SEQ ID NO: 13
  modified_base (603)..(603): a, c, g, or t

SEQ ID NO: 160 - DNA, 2716 bp, Homo sapiens; identical to SEQ ID NO: 14

SEQ ID NO: 161 - DNA, 3508 bp, Homo sapiens; identical to SEQ ID NO: 15
  modified_base (2673)..(2673): a, c, g, or t
  modified_base (2688)..(2688): a, c, g, or t
  modified_base (2695)..(2695): a, c, g, or t
  modified_base (2705)..(2705): a, c, g, or t
  modified_base (2708)..(2708): a, c, g, or t
  modified_base (2716)..(2716): a, c, g, or t
  modified_base (2724)..(2725): a, c, g, or t
  modified_base (2728)..(2728): a, c, g, or t
  modified_base (2757)..(2757): a, c, g, or t
  modified_base (2759)..(2759): a, c, g, or t
  modified_base (2763)..(2763): a, c, g, or t
  modified_base (2772)..(2772): a, c, g, or t
  modified_base (2784)..(2784): a, c, g, or t
  modified_base (2788)..(2788): a, c, g, or t
  modified_base (2794)..(2794): a, c, g, or t
  modified_base (2801)..(2801): a, c, g, or t
  modified_base (2805)..(2805): a, c, g, or t
  modified_base (2818)..(2818): a, c, g, or t
  modified_base (2828)..(2828): a, c, g, or t
  modified_base (2840)..(2840): a, c, g, or t
  modified_base (2861)..(2861): a, c, g, or t
  modified_base (2864)..(2865): a, c, g, or t
  modified_base (2934)..(2934): a, c, g, or t

SEQ ID NO: 162 - DNA, 1449 bp, Homo sapiens; identical to SEQ ID NO: 16

SEQ ID NO: 163 - DNA, 5605 bp, Homo sapiens; identical to SEQ ID NO: 17
  modified_base (2235)..(2235): a, c, g, or t
  modified_base (2659)..(2659): a, c, g, or t
  modified_base (2667)..(2667): a, c, g, or t
  modified_base (3334)..(3334): a, c, g, or t
  modified_base (5256)..(5256): a, c, g, or t

SEQ ID NO: 164 - DNA, 1781 bp, Homo sapiens; identical to SEQ ID NO: 18

SEQ ID NO: 165 - DNA, 1890 bp, Homo sapiens; identical to SEQ ID NO: 19

SEQ ID NO: 166 - DNA, 1056 bp, Homo sapiens; identical to SEQ ID NO: 20

SEQ ID NO: 167 - DNA, 623 bp, Homo sapiens; identical to SEQ ID NO: 21

SEQ ID NO: 168 - DNA, 3727 bp, Homo sapiens; identical to SEQ ID NO: 22

SEQ ID NO: 169 - DNA, 2087 bp, Homo sapiens; identical to SEQ ID NO: 23

SEQ ID NO: 170 - DNA, 665 bp, Homo sapiens; identical to SEQ ID NO: 24

SEQ ID NO: 171 - DNA, 1987 bp, Homo sapiens; identical to SEQ ID NO: 25

SEQ ID NO: 172 - DNA, 1374 bp, Homo sapiens; identical to SEQ ID NO: 26

SEQ ID NO: 173 - DNA, 2513 bp, Homo sapiens; identical to SEQ ID NO: 27

SEQ ID NO: 174 - DNA, 1737 bp, Homo sapiens; identical to SEQ ID NO: 28

SEQ ID NO: 175 - DNA, 629 bp, Homo sapiens; identical to SEQ ID NO: 29

SEQ ID NO: 176 - DNA, 3113 bp, Homo sapiens; identical to SEQ ID NO: 30

SEQ ID NO: 177 - DNA, 5190 bp, Homo sapiens; identical to SEQ ID NO: 31

SEQ ID NO: 178 - DNA, 2657 bp, Homo sapiens; identical to SEQ ID NO: 32

SEQ ID NO: 179 - DNA, 9295 bp, Homo sapiens
  modified_base (176)..(179): a, c, g, or t
  modified_base (181)..(187): a, c, g, or t
  modified_base (216)..(216): a, c, g, or t
  modified_base (942)..(942): a, c, g, or t
  modified_base (947)..(948): a, c, g, or t
  modified_base (1604)..(1604): a, c, g, or t
  modified_base (2275)..(2275): a, c, g, or t
  modified_base (2574)..(2574): a, c, g, or t
  modified_base (3132)..(3132): a, c, g, or t
  modified_base (4279)..(4280): a, c, g, or t
  modified_base (5306)..(5306): a, c, g, or t
  modified_base (5984)..(5984): a, c, g, or t
  modified_base (6071)..(6071): a, c, g, or t
  modified_base (7021)..(7022): a, c, g, or t
  modified_base (7025)..(7026): a, c, g, or t
  modified_base (7028)..(7029): a, c, g, or t
  modified_base (7747)..(7747): a, c, g, or t
  modified_base (8449)..(8449): a, c, g, or t
  modified_base (8453)..(8453): a, c, g, or t
  modified_base (8518)..(8518): a, c, g, or t
  modified_base (8544)..(8544): a, c, g, or t
  modified_base (8602)..(8602): a, c, g, or t
  modified_base (8611)..(8611): a, c, g, or t
taaccgatcgatcccgaagaccaccttgcgagggccccccccgcccggttctggatgatgtccttgacgatgcccttgatgtacctgccgctcacgaaatccacggcgcgcagcgccagccctttacggtgcttcacgtgcgccggaacacagacccggccccttcctctgtccannnntnnnnnnnttttttttttttttttttttttttttttntcattttagaatgttctttattctgacagttgttggacaaatataaggcatgttcacaagtatctgaagttatgtacaaaacacactcattcaacggatgttcctcttctccttttgtacttgctgctgcaaactgatcctcatgcacgttaacacccatagcgctcaattcttatggatatgcagacagtgttttggggaccaccgtggagaatctgtttcaaactaaggcgtgagcttctaagaactaagtcactaagacatcagaactcacagtgaacaaaggcagaggaaggtgaccaaatcagctcataaactcatgactctaagtttccagtggaacaaagaacacattgaaaaacattttttgatccttcatgttggagagaaatggaatgtgaccagaattcatggttctatatttaccactgtctaaaagtcacaaaacaatatctaattttttcatggtttctaatgcagttacagttttgttcttaggtcacagtacaagactgcatgcatactttacacaaatatcaaacacagaacgattgtaacacagatacctcagggttgtctaaagacacagcttctctttttgtggtggggtggggaaggagaatggtggtggccatttccacacacagcctgttgtgtgctcagcacggctggatgcggatcccaagcactcgctgactgactcacagaagaggacagaagctgctnagganngcagcggagttcaaagagcaggctccaaccgggggctgggatgacggacacacagcctcgattccagggggaaaaagtcttagtcgatactaattaaaaagtgttaatgatttttgaaaatcagattacatctataaaagatgaaaagcaaacacttaaaacaatctaacgggggaacataaaataataaaaaatcaaatgcagatgggatttcacaaagaggagatttgaatcttttggtctaaatcagccaatattttaacattaactataaattattaaaatatagtttgcttatgcccatccttaaaatgcagaatctttgaggaaaaatataggcatatcaggaatacagactcttgtaaaaaatttaaaaagtcagtatcatctctcttgtggagctaccagaacaggtttttcaaacagaaaaggggaacaaacgtggggaacaaacgtggggcgcttggctatgttaagaattcttatcactagaatactgcttcgagacgttcatagtactttccaaaagaagccacccacctcaaagagccctgcgcagccccagtgacccatgagtgtggtagccgtcattttattagccactgttggcaatcatcaaagtattcactcagagtggggaaattacttaatatcancgatattaacgatttccatgtatttagctttgtgacacacaatgcacaagggtcttcaaatgtttgttttttacaccagtggtagaaaattgtcattcttcggattcaacacactggtggatgacactttagtgaagtgtgactacctagaagagcaggaaggcagctcctgattctgactgggccagcctcttccagaaggtgactcttctgtcaggagatcacgaccctggcaggccgggcaagcgctctgccctttaagccactgcttaaagcaccctttgtgatacttgtgcccacatttgagcacacgcacgttttttgatttgaacacctcgtggcatatttcacaggaacttgcacccagtgcaatcctcacagggacatcttctgctttctgccccttggttttgggtgatggtgcaacaaccaccgagggtgagccctgggaggacctggtcacgggggtggcagagctgggctcataagtcctcttgtcctttcctgggtttggctttttctttttctgttcatctagaatgtgttctgtcactctttggacaatttcatcaatactcaatcctgagagtgagttcttgtttttgcttcgcacttttttaataaaaccagcaagctcagtgctgttgtaacatgggaataccactgacagntgctcaataatactattgaacggcttttttggagactggcttgaacgcgcagcacgtcctggaggaacaggctgcttccgatcagccacagggcttcgttctgacagagctgcctggccagcccgttttggccctgtcagctgagtggcttcaggctgaccagggggtggccctggcaacagcgcagaaggagcctcccctggggaatcaccagcagagaacacactaggatccctgtgaagtgctgcgtggtttccagtcacgtcgcttgcagaagtcacaagcccttggccatcgtngcctgaagactcagggagtaactcgggatgaaccgtgttacaggcaggaaatgaaagctcagaaatctgcactttagaaagttcactgagccgagaaccatttttaattgccttaatttgttcttcaaactgagactttgctttctcaatttcttttgtaacattagaaagaaacaattcccatgaacgtatatcagactccatgtcaggatatgctgcaggatcacggctaatcagccccagcttcttcagaaaggcttctgcttgtgactccatgatctgtagcttatacacttcactctccttccagttttcaagtacggatacctctgcagccacagctctctgatgactctcttcataatcctctttccctttctttatatactcttctattttcattttctcatttgtaagtgtgttgctgatttcaagggactgatccagatgtaattcatgttccttttcctttccatcatttttctgggtatacatttcactggcatttgaaacctttttaattttcttcttcagtgattttagtctttcttggatttnttttttttcctgttgccattttttaatttctctttccaaatcttgaaggaaccaatctaattccgtctttgagatcttgttttcttctaagtgccttttcaacttctcttccaggtccctggtctcttctaagcccttaagttttatctgctcataattttcatacacttcttgaagttggtcttgtaatacttggtgctccttttcaatccgtgaaatttccccttgtcgttcctcaaaaggattatatggctcagtattgacttcttggtgtattatgttccaagatacctgtatggcaaccatctgcacgtgtggaatgtttgttactgcactggtgctttctggaattacttcacatttgttgttagaatttccacagtgctcatcatttctgttagactcactcaggactgtatgagcatcacctgtgctgcagtgtgactttacagatattcccaaagagccctcaaggatctgtgtttcagaggcaatctggtgaccagcaacattctcagcattcaaatgatgaccctcaaaataggcagcagcatttttatctgctctgtcattggctacaaaagacggcaccactggtactgatcttggtagctgatattcaggagaaaggctggccaagggtgtatatatgctggtgtactggggcaaacctggtaacacgtttatgtatgctggcggtgtctgggtgatatcaaatctctggaaaggaagatacgtacagtatcctgtgaccaaatgggattgagcccaataagttggtttcacatcctcaagaaccggtttgggggaattacaggagactcgcttgtaatttgcatcctcagagcctggtttaggagaattagaagagacccctttgggttgcccatcctcagaaacttgtctagaagaattgtcggatactggtttggccttcacatcttcacaagctggcttgggagaatttgcagacacaggtttgggtttcacattttcaaaagctggtgctgaagatgaatctgacactggtttagactttacatctggtttaaattccctagcagctggattcagttgtagtttaactcgtacatactcccctgcttttgaaatttcttctacttttgttttaatgtttttcttcttnntttttttcttgagccgtgatgcaaccttcttcagtgcaatacagttgtcaatcacaacaaaacgagggcatcccaagagaaaaggttttaaacctcctgctttttctagtatctgtcgagtttcttctgggaaaaactcatattctgcagagaacatcttgttactcatgtccaagggaccatgttcctccaaaaactgagagaagtaatcatatagagttgaacatttttgttttgggttcatgtcccatagcttcttattgcggacaacatattcgttactgtgttggtcatagagagcttcgaattcttctacatcttgccgaagatggtcaggcactgcaaatgggcctgcagaatctgaatttcgattgctatggtcttcacttgaagtgatgatctcattatttgaagttactgaagttgttccagacccaactaacataggctttgaatcctttggcttctttttcttgcttttgtttttcaccttggttgaactaaacggtgcttcaccactatcttgtttccttaacacagtacagcggctgtccattatatcaaagaattcatctaaagcactatgcaatgctgggaacttgtctctgtgttcttctagcagccatattaaacaacgggcttccttcaatgatgctggctcagagaaataatcaagttgctttccttctatagagtctagtttgtgaccatatttctcattccagaggaaagtcatgatactaaaatcaagcagtttaagagatgctccataacgagaaaagaaagttcctgtggcatctaagccaaagctattaagtttttggatccaggcggctaatttgggctccacttctttaagctcactcaaaacatgcagaaatattcttgtctttactctgttattttcttgaatcaagtggcgaataacatagtccactgcttcatttagaaaatttctgctagaaaaacaggttgtatagtcttctgtgctcaaaactttccaagaaagcaattctttgagaagcntggctgtattctgtatgccggatttaatcttgtcagcatactgctttatacactgtagaattctgtcatcaaggaactgacaacgctgaacattgtctacagtttctttctgctcttcatttttgggtggattactttctcttaagtcctcctccattctttcttgtgctaacttttttgcttcttttttttggatctttctcttcaattttttgtcttctttcagtcttagtttctctaggctagaacatttctgtttcagaataggtcttggaggaaccttttcttttatgaccttgtgttcaaattcacatttaacttcaccaccactgctgaagatgataatcttagaaatgacaccttcacagtcaggggtaagacatattccttgtagaaaatccttgtcaattttatcattaaaggttgtagtttttaacttcttccagcaattcatgtgaaattctattttacagtactggcaacagctgatgcgtataaaacccttaaagtctggatcagttatgtatatctggatcttagaatatccatggcacttctgatagcaacaaatggcatctggcactggagggaacttgcattcttcaacaaatttctctaacagcatctttattttttgtggctgagactcttcaataatcacattactcgtgggccaangttaacactccaggaagacgataaatcaaggttcttgctttctcaaagtgattgagagcttctagaaatctgttttttttcaaatanacttttccaattccacagtaggccaagcaatcaaggccctcactggggtagtgttcaataatcctcttaaactggttttcggcttcagataattcctcaggctgtcctattccaaggagagaaatggcaagtccatagacgaccaaaacatagttaatcatggccaggttcaattgctttattttttgaggatctaaaccgttcagcaactctgtaaaggcctgtgcagcgctgcggcaacgctgctccaataaggccatatagccatcttgaattaagcttctcagcattttcattatattagcaaaatcctggtgtgcagctctggaagatttagaaaactgtttctccaagatgttcttcaaatctgctggtaaagtcaatggtgaactagaactgaacttttctgattcattgtttcgagatttttgttttcctttatgttttggaggctgacttgatggtggtgaaaattcaggatgacagtcacaatcatctaccttcaacgcctcatccgccacctttagattctgattaccaccgttggccatttcgtgattaatttttctgaaatctctttccttctccacaaagttaagtgaagtagtaaatataggtgctgataaactcctaggtgtgtaggccctgttttcataaaaggctttaattggatccttatttgctgttcgaccttgtaggtcttctatttgtttttgtaactttacatgctgctgaattagatccttgattccctcagggtcatttttacagagtttttgagcttttatgtttgcttgcagggcccagtcatattcccccagcatagaaagagcatcacaataacgataatgaccctttggccaagtgttcttcagaatagtggctctctttccatcaccgagtgcatttctaaactgtccagtacgaagaaaacaaagagctcggttacnntanngnnggtagttttcaggtctatattcaatggctctggtgtaatagataatagctatatcaaatctttctttggaaaactcttcatttcctttcattttcattagttctccttcctctatacaatccatacaactttgagttttaagttcttcaagcaaattgcagtcttccattacaattttagttatgtggtacttgtattcagtaaagaaaatacttaacataggccaacaattgtcaattgatcctaatttagttagaattgttacatcgcctgcatattttatccaattcagagcttcttccattgccaagattttattttctattttacaaccaattctcaataagcctccaataaggaatgaatcattagcaactttctttgccaaatccacaatatcttccatcaactcaagatgttgtagtttcttcaaatttatctcagaagcacgtgaattgttggcgtccacacagggatgcaatcgtgatattacggaactgttttgatgttgaaacagaagtggccagaagatgtttattttaatggcatcgcaataatcttgcaggacagaaattggtttactacaccatatactgcagatgtcaaattccaaattcctctcactttggatataatctttatattgcacacccaccccatcacagtaaagctgagtcacacgaacataatcattgctcataaattcagcagcaaaganacaatcatccacgtgagggcaatcttctaacaaggcataatccgccacagtgaaatctccctcagcaaaattgtccatggtgcacaagtctaaggagacaacacaaactcaagtcagtaattaaatcatttgagataacagaagaaagttttcctggcttctatggtatattagaaaaatacttggaacctatgcccaaggaaataactcctatcagaacactgagctccgaaagattctcgtccccattctgctgacttttcctctctctccagataatttaatctatttcttcctttcctcaggttcacatattcaccatctctactctaagttaacctgtttacatgtctcctttaaatagaggatcatcaagggcatcttatttatctttgtatgtgcctagcacatggtaagctctcaaataagtgtttgctgaatgaagaaaagacatcttcctgttgctgcacttgtaccctacctgcttttactgcattctgtgaaatatgccatttcatcatacacaaactgttatattctcaatctcctggcctaacctaaatcctgactccactgagaactttcctatcaactgctcatattctcctatccatctcagtgtgtttctgtcttgggcaaaggagtagggctagagtggtacagggtaagtctgccaatctcctaactccccaaggcggcatncagnccttccatcctcctatcgactgctgcttctaatgctctcacaactactgcaatacacaatcagcnctgctaaatcgcaaaaaggaaaaaanccctcacattatcaaaagccatgttttaaaaatacgtatttcaatggggggcaagggngattggtgntaaagtttcagactaagggtttttttttcctgaagaatcttcaataataaggatttttatagttatcagagaatagctacataggccaaacatcactgaaaaatgcaccattttattacttctagctcttgcccatataatggctttcttttcctatcatcaccagcgcatcataaacactattacttgtacctatcacttcaccattattatcctactattattaggataaaccaagtttcttctttccaaagcaagaacactaccagtccttgaagttcaaatctatttatttaatcaatccatctcatgatgtccaatttgctgtatgaaaacttcacaatatcacaagtgaagaataataacaatcttcctagcaaactatttgtactatgtgtcacatactgtaccaaatgttttacatgcattatttcactaatcttcacagcaattcttcttagcaggcacaattatcgttatctccactgtacagatgggaaaatgctcacttaaatcaagtaatttgctcatgtcaccaagctaggaaggattcaaatccagtctttagttgccatagcttctgctctcaaacactctcttttactacatctaattttcctgtcattgtcacctatttatctcttggttactgtcacgtttcaagatcactggcaactagttcag

SEQ ID NO: 180 - DNA, 2206 bp, Homo sapiens
  modified_base (1)..(1): a, c, g, or t
  modified_base (16)..(16): a, c, g, or t
  modified_base (1240)..(1240): a, c, g, or t
  modified_base (1826)..(1826): a, c, g, or t
  modified_base (1876)..(1876): a, c, g, or t
  modified_base (1879)..(1879): a, c, g, or t
  modified_base (1903)..(1903): a, c, g, or t
  modified_base (2178)..(2182): a, c, g, or t
nagagtcggattcgcngccgcagcagccgccgcccccgggagccgccgggaccctcgcgtcgtcgccgccgccgccgcccagatccccgcaccatgccgtcggagaagaccttcaagcagcgccgcaccttcgaacaaagagtagaagatgtccgacttattcgagagcagcatccaaccaaaatcccggtgataatagaacgatacaagggtgagaagcagcttcctgttctggataaaacaaagttccttgtacctgaccatgtcaacatgagtgagctcatcaagataattagaaggcgcttacagctcaatgctaatcaggccttcttcctgttggtgaacggacacagcatggtcagcgtctccacaccaatctcagaggtgtatgagagtgagaaagatgaagatggattcctgtacatggtctatgcctcccaggagacgttcgggatgaaattgtcagtgtaaaaccagaaaaaatgcatctcttctagaattgtttaaacccttaccaaggaaaaaaaaggggtgttaccaactgagatcgatcagttcatccaatcacagatcatgaaacagtagtgttcccacctaggagtgttaggaagttgtgtttgtgtttcaagcagaaaaactgagctccaagtgagcacattcagctttggaaactatattatttaatgtaggctagcttgttttcaaattttaaaagtttaaaaataaaatactttgcattctaagttgccaataaaatagaccttcaagttattttaatgctcttttctcactaataggaacttgtaattccagcagtaatttaaaggctttcagagagaccctgagtcttctcttcaggttcacagaacccgccgcctttttgggtagaagttttctactcagctagagagatctccctaagaggatctttaggcctgagttgtgaagcgcaacccccgcaaaacgcatttgccatcacagttggcacaaacgcagggtaaacgggctgtgtgagaaaacggccctggactgtaaactgctgaaggtccctgactcctaagagaaccacacccaaagtcctcactcttgcaggggtagacatttctggtttgggtttgttctctagatagttacacacataaagacaccactcaaaaggaaacttgaataatttataattttgatcgagtttcttaaaagaccctggagaaagagtggcatttcttctgtttcaggtttngtctgagttcaaactagtgcctgtgttgttacggaaagcagcagtgtaccagtgtcactctggagtacagcgggagaaacacaaaatagtataactgaaaacattaacattccagacacactcccttctgccttccggcttaaagctgtggatgatccacgtttttgtttttttaatgttaaatgtgtaactcagtattactgaaaaggtacccacattttgaatagtagttatcactcttaggtcagacagccatcagaattctcccacaccaagtgcatgtcagttgtggagaaaacatagcaaaaagagccgtacgctctttacagatactaatgtcaagagttaaacctcctcaggttcaacctgtgataaaagactagtgcttcccagtacttgcatggggttcactatttatagttttcttgggagtatcacaggaaaatcacaattacaccactttagaccctatgtgtagcaggtcacaacttacccttgtgtgtttagatgtgtatgaaatacctgtatacgttagtgaaagctgtttactgttaacgggggaaaaccagattctttgcatctgggngccctctactgattgttaaaggagttcctgttcacctgctccccccaccnccncgcatgcgtcctgtccacttggcntaacttttaatatgtgtattttttacattatgtatattcttaactggactgtctcgtttagactgtatacatcatatctgacattattgtaactaccgtgtgatcagtaagattcctgtaagaaatactgctttttaagaaaaaaaataacatgctgaggggtgacctatatcccatgtgagtggtcactttatttataggatctttaaaacatttttaatgaactaagttgaataaaggcacaattaaaaactgtcaaaaaaaaaaaaaaaaannnnnaaaaaaaaaaaaaaaaaaaaaaaa

SEQ ID NO: 181 - DNA, 4430 bp, Homo sapiens
  modified_base (28)..(31): a, c, g, or t
  modified_base (1327)..(1327): a, c, g, or t
  modified_base (2233)..(2233): a, c, g, or t
  modified_base (3002)..(3002): a, c, g, or t
  modified_base (3069)..(3069): a, c, g, or t
  modified_base (3561)..(3566): a, c, g, or t
  modified_base (3570)..(3570): a, c, g, or t
  modified_base (3572)..(3572): a, c, g, or t
  modified_base (3623)..(3623): a, c, g, or t
  modified_base (3836)..(3836): a, c, g, or t
  modified_base (3862)..(3862): a, c, g, or t
  modified_base (3866)..(3867): a, c, g, or t
  modified_base (3872)..(3872): a, c, g, or t
  modified_base (4038)..(4038): a, c, g, or t
atccttaattaaattaatcccccccccnnnnggtcttgttcggctcctgtgtgtaggatccagaatcaatagtgaattcgtgggatttcggcctgagagcgggccgaggagattggcgacggtgtcgcccgtgttttcgttggcgggtgcctgggctggtgggaacagccgcccgaaggaagcaccatgatttcggccgcgcagttgttggatgagttaatgggccgggaccgaaacctagccccggacgagaagcgcagcaacgtgcggtgggaccacgagagcgtttgtaaatattatctctgtggtttttgtcctgcggaattgttcacaaatacacgttctgatcttggtccgtgtgaaaaaattcatgatgaaaatctacgaaaacagtatgagaagagctctcgtttcatgaaagttggctatgagagagattttttgcgatacttacagagcttacttgcagaagtagaacgtaggatcagacgaggccatgctcgtttggcattatctcaaaaccagcagtcttctggggccgctggcccaacaggcaaaaatgaagaaaaaattcaggttctaacagacaaaattgatgtacttctgcaacagattgaagaattagggtctgaaggaaaagtagaagaagcccaggggatgatgaaattagttgagcaattaaaagaagagagagaactgctaaggtccacaacgtcgacaattgaaagctttgctgcacaagaaaaacaaatggaagtttgtgaagtatgtggagcctttttaatagtaggagatgcccagtcccgggtagatgaccatttgatgggaaaacaacacatgggctatgccaaaattaaagctactgtagaagaattaaaagaaaagttaaggaaaagaaccgaagaacctgatcgtgatgagcgtctaaaaaaggagaagcaagaaagagaagaaagagaaaaagaacgggagagagaaagggaagaaagagaaaggaaaagacgaagggaagaggaagaaagagaaaaagaaagggctcgtgacagagaaagaagaaagagaagtcgttcacgaagtagacactcaagccgaacatcagacagaagatgcagcaggtctcgggaccacaaaaggtcacgaagtagagaaagaaggcggagcagaagtagagatcgacgaagaagcagaagccatgatcgatcagaaagaaaacacagatctcgaagtcgggatcgaagaagatcaaaaagccgggatcgaaagtcatataagcacaggagcaaaagtcgggacagagaacaagatagaaaatccaaggagaaagaanaagaggggatctgatgataaaaaaagtagtgtgaagtccggtagtcgagaaaagcagagtgaagacacaaacactgaatcgaaggaaagtgatactaagaatgaggtcaatgggaccagtgaagacattaaatctgaaggtgacactcagtccaattaaaactgatctgataagacctcagatcagacagaggtaagtgtattgtttctcactttgattagggctttttgttactgtttgacagtgcagcgtaagtatgcacagatgaagatggaactaagccgagtaagaagacatacaaaagcctcttctgaaggaaaagacagtgtagtcctgcaaaacattttgaggtacattgttttgtctcagctattttgtagcagactcgtgcccccattagtgtgcctctttggaaattatcgcccacatttgtaatatagtcgccattgaaaagttaattatcctttttttagggattttgatgtcatttcttttttttttttaataaaaaggttgaactgtttttttttttctttttggtattaagtccatcttgtgttggtacattggcagagacatatgctttaaaaacttaaatatttcggaggcacatgttggactactttgttttaattaaactgctagtatttctttgtcaaggatgtttctagttttttgctttattgccttgcattctaatgcagtttgttctgtaactcgagagccagtagcattggattgatggaagtgtagggtttatgaattattgcagctgactaccatacctcacacagcgttggtgttgtgagcggcccatgaaaagccaaattaaaaatcaaggattcagtcaaactaagcaggtactcatgccaggtactcctttctctacccacatccatgtttgantgctattgcctgtgatctttacgcttaactgttgtgtatcttttttgttctttacaagaagtgcagaggggttttttgtgtattgcgtgaaaacttataaaacaaatgttaacagaatggaattttttttcaactgtatgtagggctgcagtggtggccagaattagatatctttaaagaattttaaatacaataaacacttcatattattcgccttgttacactcaatgcaattctcaagtctataagaggtatgtgcttaatatttcctactgtgtaggagaatttgcagtcagccataggtatgtaggaatagtcactcactggctgatacatttaaagcagcagtgtgaatagcaaggacagacaccttcaatttgtgaaatcaaagaactgatgcactatatagaacgaatttgggtttttaaagaaatattaaaagttaggtactgtaagtgttcttaaaacctgtaaacttcattctgtgggctagtggtgtgggacaaaatattcctaatgaaaggaagtaccaattagttgatttgttggtggcattccccttttgggaaagcaatgtaaggttatgtctgtgtatgtcattcacacttaggcaagcatacacaggcacatggctttaagaaccacactgatgccttgataattaaaaagaatacaagcattccatgtacacatgttaattagcagttagtgactgggccaacactttctcataaaaattggccttttacatgttgtctaattatcattnttccccaaattttgcgttgtaggactactgttcgaagatttttggaagaatactgagaacggcatanagtgaagatcgacatttaaaaaatgaggtgaaagaaagctatagtggcatagaaaaagtataaagctcagttagtttttttattattattattattaaaagttaattcaggactgatgtgacctaccagatttcagaacatgtgttaatagtatatatgccactgaaaacttaggtcctgtatcatacttttttctttaagactttttaagaaatattacttaaacatgtggcttgctcagtgtttaattgcaagttttcaatcttggactttgaaaacaggattaaacgttagtattcgtgtgaatcagactaagtgggatttcatttttacaactctgctctacttagcctttggatttagaagtaaaaataaagtatctctgactttctgttacaaaaaaaaaaaaaaagctgttgattgtctctgtcattgaaaagttttagtattaatctttttctaataaagttattgactctgaaaaaaaaaaannnnnnaaananaagagttacactattactagaggtgttggtgtacagttttatctgatttgntctgtttaagactaatttttatagactttctaatgttttaaataatggtgcttcaattttaggtggttatgaataaatttgaattttgcttttaatagcaaagatgtgcagtgaactagaatatatttttacatccctgagagattcatttagtagaaaattccaagtatcctgacaagcactctttagctggctagctatgggatgatgtanaaaagcattcaagagctagtttttgntaanncctgnatcaagattaacccagctgtgtcagtttataaatgtatttgtgtatagggtgtgtagtatatatggcaagggttttttccccccacttaagtgattatttttgtgtcacatctaggaaaaccggcagcatgtttctatctatagccagcttcttcgactgtataanagtattctctccagctacgtatatacacacatacatatatatcatagcaattccttgtggtttataacttgcaaatactgctatcagtttataggtaaagaaacagtgtgttaaatgacttatccagggagggtcctgtggcttcatgtttatggagttgctaggtctctgcctcatggtccagtgcctgttaagccactgtgttcattctaataggcataatgaattgttaaagaatttactaaaatctcttccaccaaactttgaaaaataatgaagccgcccccactttagaggctctgtatgaaaaaatgctgtggagacagagccctcctggctccctagctgatcctggagatgcagcaatagatgaatgggttatctctgaattt

SEQ ID NO: 182 - DNA, 4330 bp, Homo sapiens
  modified_base (2)..(7): a, c, g, or t
  modified_base (9)..(9): a, c, g, or t
  modified_base (20)..(20): a, c, g, or t
  modified_base (2452)..(2452): a, c, g, or t
  modified_base (2456)..(2456): a, c, g, or t
  modified_base (3312)..(3312): a, c, g, or t
  modified_base (3550)..(3550): a, c, g, or t
  modified_base (3562)..(3562): a, c, g, or t
  modified_base (3572)..(3572): a, c, g, or t
  modified_base (3598)..(3598): a, c, g, or t
  modified_base (3621)..(3621): a, c, g, or t
  modified_base (3699)..(3699): a, c, g, or t
  modified_base (4140)..(4140): a, c, g, or t
  modified_base (4180)..(4180): a, c, g, or t
  modified_base (4199)..(4199): a, c, g, or t
  modified_base (4203)..(4205): a, c, g, or t
gnnnnnngnggcaggtgccngacatggcgagtgtagtgctgccgagcggatcccagtgtgcggcggcagcggcggcggcggcgcctcccgggctccggctccggcttctgctgttgctcttctccgccgcggcactgatccccacaggtgatgggcagaatctgtttacgaaagacgtgacagtgatcgagggagaggttgcgaccatcagttgccaagtcaataagagtgacgactctgtgattcagctactgaatcccaacaggcagaccatttatttcagggacttcaggcctttgaaggacagcaggtttcagttgctgaatttttctagcagtgaactcaaagtatcattgacaaacgtctcaatttctgatgaaggaagatacttttgccagctctataccgatcccccacaggaaagttacaccaccatcacagtcctggtcccaccacgtaatctgatgatcgatatccagaaagacactgcggtggaaggtgaggagattgaagtcaactgcactgctatggccagcaagccagccacgactatcaggtggttcaaagggaacacagagctaaaaggcaaatcggaggtggaagagtggtcagacatgtacactgtgaccagtcagctgatgctgaaggtgcacaaggaggacgatggggtcccagtgatctgccaggtggagcaccctgcggtcactggaaacctgcagacccagcggtatctagaagtacagtataagcctcaagtgcacattcagatgacttatcctctacaaggcttaacccgggaaggggacgcgcttgagttaacatgtgaagccatcgggaagccccagcctgtgatggtaacttgggtgagagtcgatgatgaaatgcctcaacacgccgtactgtctgggcccaacctgttcatcaataacctaaacaaaacagataatggtacataccgctgtgaagcttcaaacatagtggggaaagctcactcggattatatgctgtatgtatacgatccccccacaactatccctcctcccacaacaaccaccaccaccaccaccaccaccaccaccaccatccttaccatcatcacagattcccgagcaggtgaagaaggctcgatcagggcagtggatcatgccgtgatcggtggcgtcgtggcggtggtggtgttcgccatgctgtgcttgctcatcattctggggcgctattttgccagacataaaggtacatacttcactcatgaagccaaaggagccgatgacgcagcagacgcagacacagctataatcaatgcagaaggaggacagaacaactccgaagaaaagaaagagtacttcatctagatcagcctttttgtttcaatgaggtgtccaactggccctatttagatgataaagagacagtgatattggaacttgcgagaaattcgtgtgtttttttatgaatgggtggaaaggtgtgagactgggaaggcttgggatttgctgtgtaaaaaaaaaaaaaaatgttctttggaaagtacactctgctgtttgacacctcttttttcgtttgtttgtttgtttaatttttatttcttcctaccaagtcaaacttggatacttggatttagtttcagtagattgcagaaaattctgtgccttgttttttgtttgtttgttgcgttcctttcttttccccctttgtgcacatttatttcctccctctaccccaatttcggattttttccaaaatctcccattttggaatttgcctgctgggattccttagactcttttccttcccttttctgttctagttttttacttttgtttatttttatggtaactgctttctgttccaaattcagtttcataaaaggagaaccagcacagcttaggatttcatagttcagaatttagtgtatccataatgcattcttctctgttgtcgtaaagatttgggtgaacaaacaatgaaaactctttgctgctgcccatgtttcaaatacttagagcagtgaagactagaaaattagactgtgattcagaaaatgttctgtttgctgtggaactacattactgtacagggttatctgcaagtgaggtgtgtcacaatgagattgaatttcactgtctttaattctgtatctgtagacggctcagtatagataccctacgctgtccagaaaggtttggggcagaaaggactcctcctttttccatgccctaaacagacctgacaggtgaggtctgttccttttatataagtggacaaattttgagttgccacaggaggggaagtagggaggggggaaatacagttctgctctggttgtttctgttccaaatgattccatccacctttcccaatcggccttacttctcactaatttgtaggaaaaagcaagttcgtctgttgtgcgaatgactgaatgggacagagttgattttttttttttttntccnttgtgcttagttaggaaggcagtaggatgtggcctgcatgtactgtatattacagatatttgtcatgctgggatttccaactcgaatctgtgtgaaactttcattccttcagatttggcttgacaaaggcaggaggtacaaaagaagggctggtattgttctcacactggtctgctgtcgctctcagttctcgataggtcagagcagaggtggaaaaacagcatgtacggattttcagttacttaatcaaaactcaaatgtgagtgtttttatctttttacctttcatacactagccttggcctctttcctcagccttaagaaccatctgccaaaaattactgatcctcgcatgatggcagccatagtgcatagctactaaaatcagtgaccttgaacatatcttagatggggagcctcgggaaaaggtagaggagtcacgttaccatttacatgttttaaagaaagaagtgtggggattttcactgaaacgtctaggaaatctagaagtagtcctgaaggacagaaactaaactcttaccatatgtttggtaagactccagactccagctaacagtccctatggaaagatggcatcaaaaaagatagatctatatatatatataaatatatattctattacattttcagtgagtaattttggattttgcaaggtgcatttttactattgttacattatgtggaaaacttatgctgatttatttaagggggaaaaagtgtcaactctttgttatttgaaaacatgtttatttttcttgtctttattttaacctttgatagaaccattgcaatatgggggccttttgggaacggactggtatgtaaaagaaaatccnttatcgagcagcattttatttacccctcccctatccctaggcacttaaccaagacaaaaagccacaatgaacatccctttttcaatgaattttataatctgcagctctattccgagcccttagcacccattccgaccatagtataatcatatcaaagggtgagaatcatttagcatgttgttgaaaggttttttttcagttgttctttttagaaaaaaagaaaaacaaaaacaaaaanaaaaaaaaaaantcacaccatngctcacagaattggcatctcattttngggacctcccatctttctgtttngaaaagtgtacagtagtgcagtgttcctgatgtaactttatggcttacaatgttgacatgtctcaggttcatgtgttncgattggtgttttccgtctcaggtagattgcaaagtgtaggccccacacattggaaaaaataataataaaacaaagcaaaaacaggaaattatggattttagttgtatattggtttatgtattttttcttaagtatacagtgcactgtttgaaatgtattgttgagtattactttgtacaggttgatcactttttttagagtgaagaaagaacaaacttgttttttgtgttttttaaaggaatataaaataatgaaggatgtataattgatgccaaataagcttgttctttagtcacaccgacgtcttatttttccctttaggccagttctgtttttaaggtgtacatggacaatgttacagtgtaagaaactccatatccatatgttcccattcgcattttgtattggttcatgtataccatttttacaaaaaaaaaaangaaaaaaaagaagtactataaaatatctgtcttcttaatnaaaaaaaaattaatgttanaaannnaaaaaaaaaaaaaaaaaaaaaaaaaaaaaaaaaaaaaaaaaaaaaaaaaaaaaaaaaaaaaaaaaaaaaaaaaaaaaaaaaaaaaaaaaaaaaaaaaaaaaaaaaaaaaaaaaaaaaaaaaaaaa

SEQ ID NO: 183 - DNA, 3387 bp, Homo sapiens
agggccacaggtgctgccaagatgctccagggcacctgctccgtgctcctgctctggggaatcctgggggccatccaggcccagcagcaggaggtcatctcgccggacactaccgagagaaacaacaactgcccagagaagaccgactgccccatccacgtgtacttcgtgctggacacctcggagagcgtcaccatgcagtcccccacggacatcctgctcttccacatgaagcagttcgtgccgcagttcatcagccagctgcagaacgagttctacctggaccaggtggcgctgagctggcgctacggcggcctgcacttctctgaccaggtggaggtgttcagcccaccgggcagcgaccgggcctccttcatcaagaacctgcagggcatcagctccttccgccgcggcaccttcaccgactgcgcgctggccaacatgacggagcagatccggcaggaccgcagcaagggcaccgtccacttcgccgtggtcatcaccgacggccacgtcaccggcagcccctgcgggggcatcaagctgcaggccgagcgggcccgcgaggagggcatccggctcttcgccgtggcccccaaccagaacctgaaggagcagggcctgcgggacatcgccagcacgccgcacgagctctaccgcaacgactacgccaccatgctgcccgactccaccgagatcaaccaggacaccatcaaccgcatcatcaaggtcatgaaacacgaagcctacggagagtgctacaaggtgagctgcctggaaatccctgggccctctgggcccaagggctaccgtggacagaagggtgccaagggcaacatgggtgagccgggagagcctggccagaagggaagacagggagacccgggcatcgaaggccccattggattcccaggacccaagggcgttcctggcttcaaaggagagaagggtgaatttggagccgacggtcgcaagggggcccctggcctggctggcaagaacgggaccgatggacagaagggcaagctggggcgcatcggacctcctggctgcaagggagaccctggaaaccggggccccgacggttacccgggggaagcagggagtccaggggagcgaggagaccaaggcggcaagggggaccctggccgcccaggacgcagagggcccccgggagaaatcggggccaagggaagcaaggggtatcaaggcaacaatggagccccaggaagtcctggtgtgaaaggagccaagggcgggcctgggccccgcggacccaaaggcgagccggggcgcaggggagaccccggcaccaagggcagcccaggcagcgatggccccaagggggagaagggggaccctggccctgagggcccccgcggcctggctggagaggttggcaacaaaggagccaagggagaccgaggcttgcctggacccagaggcccccagggagctcttggggagcccggaaagcagggatctcggggagaccccggtgatgcaggaccccgtggagactcaggacagccaggccccaagggagaccccggcaggcctggattcagctacccaggaccccgaggagcacccggagaaaaaggcgagcccggcccacgcggccccgagggaggccgaggcgactttggcttgaaaggagaacctgggaggaaaggagagaaaggagagcctgcggatcctggtccccctggtgagccaggccctcgggggccaagaggagtcccaggacccgagggtgagcccggcccccctggagaccccggtctcacggagtgtgacgtcatgacctacgtgagggagacctgcgggtgctgcgactgtgagaagcgctgtggcgccctggacgtggtcttcgtcatcgacagctccgagagcattgggtacaccaacttcacactggagaagaacttcgtcatcaacgtggtcaacaggctgggtgccatcgctaaggaccccaagtccgagacagggacgcgtgtgggcgtggtgcagtacagccacgagggcacctttgaggccatccagctggacgacgaacatatcgactccctgtcgagcttcaaggaggctgtcaagaacctcgagtggattgcgggcggcacctggacaccctcagccctcaagtttgcctacgaccgcctcatcaaggagagccggcgccagaagacacgtgtgtttgcggtggtcatcacggacgggcgccacgaccctcgggacgatgacctcaacttgcgggcgctgtgcgatcgcgacgtcacagtgacggccatcggcatcggggacatgttccacgagaagcacgagagtgaaaacctctactccatcgcctgcgacaagccacagcaggtgcgcaacatgacgctgttctccgacctggtcgctgagaagttcatcgatgacatggaggacgtcctctgcccggaccctcagatcgtgtgcccagaccttccctgccaaacagagctgtccgtggcacagtgcacgcagcggcccgtggacatcgtcttcctgctggacggctccgagcggctgggtgagcagaacttccacaaggcccggcgcttcgtggagcaggtggcgcggcggctgacgctggcccggagggacgacgaccctctcaacgcacgcgtggcgctgctgcagtttggtggccccggcgagcagcaggtggccttcccgctgagccacaacctcactgccatccacgaggcgctggagaccacacaatacctgaactccttctcgcacgtgggcgcaggcgtggtgcacgccatcaatgccatcgtgcgcagcccgcgtggcggggcccggaggcacgcagagctgtccttcgtgttcctcacggacggcgtcacgggcaacgacagtctgcacgagtcggcgcactccatgcgcaacgagaacgtggtacccaccgtcctggccttgggcagcgacgtggacatggacgtgctcaccacgctcagcctgggtgaccgcgccgccgtgttccacgagaaggactatgacagcctggcgcaacccggcttcttcgaccgcttcatccgctggatctgctagcgccgccgcccgggccccgcagtcgagggtcgtgagcccaccccgtccatggtgctaagcgggcccgggtcccacacggccagcaccgctgctcactcggacgacgccctgggcctgcacctctccagctcctcccacggggtccccgtagccccggcccccgcccagccccaggtctccccaggccctccgcaggctgcccggcctccctccccctgcagccatcccaaggctcctgacctacctggcccctgagctctggagcaagccctgacccaataaaggctttgaacccaaaaaaaaaaa

SEQ ID NO: 184 - DNA, 2008 bp, Homo sapiens
tgggacactgctcagggaagagcctgctacggtggactgtgagactcagtgcactgtcctcctcccagcgaccccacgctggaccccctgccggaccctccacccttcggcccccaagcttcccaggggcttcctttggactggactgtccctgctcatccattctcctgccacccccagacctcctcagctccaggttgccacctcctctcgccagagtgatgaggtcccggcttctgctctccgtggcccatctgcccacaattcgggagaccacggaggagatgctgcttgggggtcctggacaggagcccccaccctctcctagcctggatgactacgtgaggtctatatctcgactggcacagcccacctctgtgctggacaaggccacggcccagggccaacccaggccaccccacaggccagcccaggcctgccggaagggccgccctgctgtgtccctgcgagacatcaccgcacgtttcagtggccagcagcccacactgcccatggctgatactgtggaccccctggactggctttttggggagtcccaggaaaagcagccaagccagagggacctgccaaggaggactggcccctctgctggcctctggggtccacatagacagatggacagcagcaagcccacgggggcccccagagggaggctctgtgaagccaggatgcctgggcattccctggcaagaccaccgcaggatgggcagcagagctctgacctaagaagctggacttttgggcagtctgcccaagccatggcctcccgccaccgcccccgccccagcagtgtcctcagaacactctactcgcacctcccggtgatccatgaactctgacccctccccagtaaaggcttctgtagagagcatgctgggtctgcatctcctctcgtctcctccatggtggtcactgcccctggcaggtctctgaaagggaaatgcttttctgcggaggcccctgcttgggcagttcacagtgagaccgaccccctctgaatatgataacagcctgtttcacatgaggagatgttaccaatcccgttcgctctgacccttgctggctgatcaccttgagcaacttacttaacatctgtgttcctcagtttctcatgggtaatatagggataattactggcacctgcctcccaggccattctgacgtgtaaccgcatataggagcccactggctgagtagctaccatcatcgctggtggggaaactggtggtaggggtgtgagggtagtgggggtgtcagccccccaggtgtttcagaacaaggcctcgggcactcccaagtctgcctcttggctcccaccctcaaagcccatgttctgcgaggcccaagagaacacatggagtcttagcaaatgcactaatgtattccgggggactgtcacctggcaccactggggcactctgctggctacaactcatacgtcctgtggtggcattgggagagttcccccatgatgagggccaagatagaatctgtaccactcagtgctaccatccccacccctacaccacttccacacaggggcctcatggcatggtcagggtcccagctgtaggtgagagcagggcactgtccagctgtccactggggaagtcaagatgtcctaaggcccaggtcagggcatctggagtctgaaggaccctagttcctagaggcatctggcagcaagaaggtgaggcatcagggaacgggaatcaggctgggactgatcagaggtgaagggacagagagaggagaggaggaagattgagctgggggcaacagccaagctcacctgggcaggtctctgccacctccttgctctgtgagctgtcagtctaggttattctctttttttgtggctatttttaattgctttggatttgttaaatgttttctgtcttctgttaagtgtgttttctctggagatagaatgtaaaccatattaaaaggaaaaagtttcagacaagcaaaaaaaaaaaaaaaaaaa

SEQ ID NO: 185 - DNA, 688 bp, Homo sapiens
atcctaatacgactcactataggactcgagcggccgcccgggcaggtgagacagacaaagcgttaggagaagaagagaggcagggaagacaagccaggcacgatggccaccttcccaccagcaaccagcgccccccagcagcccccaggcccggaggacgaggactccagcctggatgaatctgacctctatagcctggcccattcctacctcggaggtggaggccggaaaggtcgcaccaagagagaagctgctgccaacaccaaccgccccagccctggcgggcacgagaggaaactggtgaccaagctgcagaattcagagaggaagaagcgaggggcacggcgctgagacagagctggagatgaggccagaccatggacactacacccagcaatagagacgggactgcggaggaaggaggacccaggacaggatccaggccggcttgccacaccccccacccctaggacttattcccgctgactgagtctctgaggggctaccaggaaagcgcctccaaccctagcaaaagtgcaagatggggagtgagaggctgggaatggaggggcagagccaggaagatcccccagaaaagaaagctacagaagaaactggggctcctccagggtggcagcaacaataaatagacacgcacgtcagccacagcttgaaaaaaaaaaaaaaa

SEQ ID NO: 186 - DNA, 645 bp, Homo sapiens
gcggccaagatgagcacggaaggtggtggccgtcgctgccaggcacaagtgtcccgccgcatctccttcagcgcgagccaccgattgtacagtaaatttctaagtgatgaagaaaacttgaaactgtttgggaaatgcaacaatccaaatggccatgggcacaattataaagttgtggtgacagtacatggagagattgaccctgctacgggaatggttatgaatctggctgatctcaaaaaatatatggaggaggcgattatgcagccccttgatcataagaatctggatatggatgtgccatactttgcagatgtggtgagcacgactgaaaatgtagctgtttatatctgggacaacctccagaaagttcttcctgtaggagttctttataaagtaaaagtatacgaaactgacaataatattgtggtttataaaggagaatagctattggggttagcattgcacaaagcccagtttctttctgtgtttgaaaaagattttgatccccttggaatattaagaggtcaacacgtgattgttgtacgtacacattgtgctctggagtgcctatttattgaaatcattgtaagacctgttataaatttaagtctatttaaaactaaacttgtaatatacatcctg

SEQ ID NO: 187 - DNA, 1266 bp, Homo sapiens
cggctccgcccggctgccgcctaggatgaatatcatggacttcaacgtgaagaagctggcggccgacgcaggcaccttcctcagtcgcgccgtgcagttcacagaagaaaagcttggccaggctgagaagacagaattggatgctcacttagagaacctccttagcaaagctgaatgtaccaaaatatggacagaaaaaataatgaaacaaactgaagtgttattgcagccaaatccaaatgccaggatagaagaatttgtttatgagaaactggatagaaaagctccaagtcgtataaacaacccagaacttttgggacaatatatgattgatgcagggactgagtttggcccaggaacagcttatggtaatgcccttattaaatgtggagaaacccaaaaaagaattggaacagcagacagagaactgattcaaacgtcagccttaaattttcttactcctttaagaaactttatagaaggagattacaaaacaattgctaaagaaaggaaactattgcaaaataagagactggatttggatgctgcaaaaacgagactaaaaaaggcaaaagctgcagaaactagaaattcatctgaacaggaattaagaataactcaaagtgaatttgatcgtcaagcagagattaccagacttctgctagagggaatcagcagtacacatgcccatcaccttcgctgtctgaatgactttgtagaagcccagatgacttactatgcacagtgttaccagtatatgttggacctccagaaacaactgggaagttttccatccaattatcttagtaacaacaatcagacttctgtgacacctgtaccatcagttttaccaaatgcgattggttcttctgccatggcttcaacaagtggcctagtaatcacctctccttccaacctcagtgaccttaaggagtgtagtggcagcagaaaggccagggttctctatgattatgatgcagcaaacagtactgaattatcacttctggcagatgaggtgatcactgtgttcagtgttgttggaatggattcagactggctaatgggggaaaggggaaaccagaagggcaaggtgccaattacctacttagaactgctcaattaagtaggtggactatggaaaggttgcccatcatgactttgtatttatatacaattaactctaaataaagcaggttaagtatcttccatgttaatgtgttaagagactgaaaataccagccatcagaaactggcgtcgagtctaga

SEQ ID NO: 188 - DNA, 639 bp, Homo sapiens
atgaaggccactatcatcctccttctgcttgcacaagtttcctgggctggaccgtttcaacagagaggcttatttgactttatgctagaagatgaggcttctgggataggcccagaagttcctgatgaccgcgacttcgagccctccctaggcccagtgtgccccttccgctgtcaatgccatcttcgagtggtccagtgttctgatttgggtcttcctccttcccttacggaattacatcttgatggcaacaaaatcagcagagttgatgcagctagcctgaaaggactgaataatttggctaagttgggattgagtttcaacagcatctctgctgttgacaatggctctctggccaacacgcctcatctgagggagcttcacttggacaacaacaagcttaccagagtacctggtgggctggcagagcataagtacatccaggttgtctaccttcataacaacaatatctctgtagttggatcaagtgacttctgcccacctggacacaacaccaaaaaggcttcttattcgggtgtgagtcttttcagcaacccggtccagtactgggagatacagccatccaccttcagatgtgtctacgtgcgctctgccattcaactcggaaactataagtaa

SEQ ID NO: 189 - DNA, 4140 bp, Homo sapiens
  modified_base (319)..(319): a, c, g, or t
  modified_base (690)..(690): a, c, g, or t
  modified_base (1263)..(1263): a, c, g, or t
ggtttttttttttttttttttttttttttttttttttttttttttttttttttttttttttttttttttttttttttttttttttttaactgaatgcataactttattaaataaatgctttgtcatgacaaaagacaaagatcaaggagtaacataaattataagttgaataaatagtatacagcaatcttcactttttaagaaaatgtgagatcctttgttggttttttatttccttaagtacaaaatgctaaacgggagccgagctcttccgcattcaggtgttttttttttttttttcggcttttttttttttttnctcacaaactggttgcatttgttgatttatttttccatccttttcaccagtaaagattatcatcgtttatttttgtttttaaagttgaaaacaaaaaagaggagagaacagagttatggtatgaatgtatgtaaaactatagagaactacagtaatatgtactgtggttattgctgtcttcaaaaaaaaaaagaaaaagaaaaacaacaacaacaacaacgaaaacaaccggtaggcaactcggaatctgaaggaatcttgtctgacaactgtgctatccatgtgggctacggtgtgacagtggcggtagagaggagactccggctggcgaccggggactggtggagtggggtgagcgggcacagggaagnctggggtccccttcccctcggaccctccccaccttccctttccccatccaaaaggatttcaggagaggaggccagagtctgtgaaatgactaaactatatactccattagaaaaccaagaaagtatgtttgaaatagaaacaaaagcctaagagaaaataaaaagtggagaaacagtgcaatgtaattcttgcactttagtggttttaaaaacacagacagtacaaggcccaggttgctggctggtgaaacccctgtccctcgtccctcctccactttgcaaaacggagcctcctttctcttggaagccagacatatcctctctgacgctatggggtttcttctccttagagctcttctctgaggttcccattctgggccggagccctctcaggagtgagtggatgggtccggggtactgtcccaccttgaggggggcttggcggttgccgtggcagccctgtctcactaaccggtgcgtggcgggagcaggtggttgaggcccaccctctaggggaggccagccctgtgggggtaccatggaggccacagaggtggtggtggggagatgggntgggagagaaggggcatgatcagaaaagggcctccctggacctcgtgcgcctgccttcctcccctcatggggccagtgtccccaggcctgtctgtctaggcctggctgtcaaagaaaggttccagtctcttcctccccatgtgccctgctttgccaggtgggtcagggcaggctggaggaaggagggtcagtcctggctgggcttccctatctcctggcagtcgtgggaaagacagaggcatcttcctcactggtggagtgaggcacgaatctaaaggggatgggaagaccttctgtgggtgtgagcatgggagtgggcagcacttagattcggagccatggatagtccggagtccaaggtctctgggtgagcagacagtcggccaaaggccagcctggagtcaaagagaccagacccctgcttagattgccatactcgcaccattccaaacctgcctccctcacaccctgccatgggggaagaggtgccgtcttcctccagtgcctcccttcccaggatctccccaccctgggctcagccagaactcccatttgggaggcttagttccatgtgtccatgaaggcccagcttctctggggagtgaccagctgcccaggagaaactcctgcatgcagaagagactcacaggtttgggttcgcaggcacgaactttggaaaccggaagagtctggcgcacttacaccaggctctaatcccccacctgatggctggcagcaaagagccaacgcaaggggcagaagcctgctcaaagtccagacacagtccgtgaagagagagcccctctcaagaattaggtccaggctgggaggaatgtggggggagcttgtagttcctggctcagtcttttctcaggggagtggcaccccagtatccacttggcagatcctagttggataactgctcaagatgcaaagggagaatgggtggaaagaacagtgacgtggaagaggtttgggatactggcctaagacatacagaaacgtgagttgggtttaggggacagctgtgcagagagatggggcatgctgactcggcaggtcaaggccttgtggctgctggccctatcgggcccctttgtctcatgaagattgagcacttctcctgtccccagccaactgtcctgtccaggggcataggagatagcccccaagttctatagctatagggttcccatcagttgaaacagatttgctttttcgctattcctcttcgtagccccaaattcgttgttggaggcggtctccgctgtgtcatgccatgagcaaagagtgaagagagctgtgtccacagcacgaaggggtctccttggccagtgtccaagccccctttcctggatatcttcagccttaaagaacagtcacaaggccacccattggttgaggaagtcattggagaatgggagtttcggaatctggctgccgagtgacagcatccctgaatcatgcgttccctgcttgtcccagctttccttccatcctccaccccagggaggatgcagggactggccagaatggaggaagagctggaaagactcgtgggcctcagtccctcattgcaggctgaaggtgggcagcggagcacatagtcttgtcccttccaaagcatggccagtttagactgattcttcctatctggcttctaaagtctagcaccctcctaaagttactcaccttccctggctctgcggcctggattaagctcatttctattttgcaacccattcccccattttcctctctttcctctcaaatcctagaaaatacatatggtggggaagctaaggaaatttctattggcttttccccctttctgctgctttgtgccaaagctagaatggaacagtcagccccctctcccttcagccctctgttcctccccacatcgactctggccggaaccatccatcttactgttctcctgcatctaaacctttttgccaccatctccctctgccatctcttacttcagtctccctcctgctctgccagcatggagagtgagggaggcttccaaaaatgcacattctgttcagatgaaaggaaaaggctggggtgggactggtggatccatcgtggacctgttgggctcatgtggtgtggtgtccggagactgtgacttcctgagggtttaaagactaaaatgggatggactgaggcgcgtgctgtgtgcaccacggagggctggcctctgcctggctcggtgggtgcagatgaacacacgtggggaatcactgtcaaatccagtactgtgccccacaaaaaagctgagtttattgctcacgggaaactctgcctcgaggcaggcaaaaatgctattacgggttgtattaggagaatatgggttttctcagttttcccagaatgaggaagctcctcaatgcccctataggaactactttgaaaagttaatgcaaacctttgaaagaaaggaagaaagaaaaaaacaaagaaaaagaatagatttatatgcctatatatgactatatggagtcctgtagataaatacgagcccacttttttttttcagcctatcctcccccacagaggctgctgcgctacttacaaattgaattaaatgagggctgaaacggcacgcttcagcatgtactgtagtcaccgtggaagaacaagtctttccaatattggggcatgtattgatttctaaaaaatgtctgcctggggaatgaaatatgcacatgtatttcatattcacagatctgcttccgaaaacctctctatttaatatcactcaattatgaatttgttttgctttcagaggaatggaatgcattttagtttttataaatttggggagagacaacactctgcccaggtaagaggagaggaagttcaggg

SEQ ID NO: 190 - DNA, 3460 bp, Homo sapiens
  modified_base (377)..(377): a, c, g, or t
  modified_base (444)..(444): a, c, g, or t
  modified_base (674)..(674): a, c, g, or t
  modified_base (820)..(820): a, c, g, or t
  modified_base (827)..(827): a, c, g, or t
  modified_base (872)..(877): a, c, g, or t
  modified_base (979)..(979): a, c, g, or t
  modified_base (1074)..(1075): a, c, g, or t
  modified_base (1089)..(1089): a, c, g, or t
  modified_base (1186)..(1186): a, c, g, or t
  modified_base (1297)..(1297): a, c, g, or t
  modified_base (3146)..(3146): a, c, g, or t
  modified_base (3173)..(3174): a, c, g, or t
  modified_base (3176)..(3176): a, c, g, or t
  modified_base (3227)..(3228): a, c, g, or t
  modified_base (3421)..(3421): a, c, g, or t
ttttttttttttttttttttttttttttttttttatcattcaacattttatatcagaaaagatcagctttccaacatttattccatggaatgagtgcacagcattttcatgaactacctcagggctacatcagtacaaaatagtttaaattagtaaaataaagtagtttcaaagggaaatcattgacgacttcaggataagtgccaccaccatttgggaacagaggatagaaggtagccatgtggttattccatgatgcaggaatcaggtcggcaggtggactgtcattgctgtcttgcggcagctggcctctgccttcagggtaccaccgtctccaggacacaaatgggcagcagaaaaatgtcaccttgttgatnctcagcagctcatctattgggacaaaacttccatctcggccaagggaaatactctgttgagtgaccnagcggggcccagcccccagccctatttatctcatcaatatggttcagggaagataaaaaagagtgttctatgggatagaaaggtgggaataagaaaaaactaagtggctgggcatggtgagtcacgcctgtaatcccaacactttgggaggccaaggtgggcggatcacgaggtcgagattgagaccatcctggccaacacagtgaaaccccgtctctactaaaaatacnaaaattagccgggcgtggtggtgcacacctgtagtcccagctactcaggaggctgagacaggagaatcgcttgaatacgggaggcggaggctgcagtgagccgagacagtgctgcagtgagccgagatggcaccactgcactccangcctggngacaaagggagactctgcctccagaaaaaaaaaaaaaaaaaaaannnnnnggaaaggaaaagctaagcagatgacttatgtggcaaatgaggaatcaaattctctatttgtggtctgagatgccttttcctggcccagttttctgtccaaanggctcttttaacctccaagttatacactattaatggtaggcccatagtggggcggggtgtgatgagctggaaaagcatgatgtgcgtgtgcgtgnncgggggtggggccnatcatcagaatttgcacaggctgctgggaagagccatggctgtctgctgggaactctgctggggcaagcaagccctttgactctcctgcccatctcnagaatatttctaaaatgttttaaccagcaagttaaaaaaaaatttaaccctctttatatagataccctggacaccttttcttatggttcctccaagatgattataacttcngtctgacactatatattcctttaataacaaaatttcccagaaggctcacaaatcatggttggcagtgcagccttttcaatactggacacatcccatgctaaggccctctgcacagattttgtttactatcactggcgatcagcccaaacttctcaccccatatatcaacccaccccgatgtgtacaccaggtactatgtgacccacctactactggctaatgatgcaacttctgagagacccttgcaccctcactgcacgtcttgccacacaggtggcttggtgtcacgtactccctggcaccatctggttcatgccaggtttagagttcatcgtgtttggcttcctggtctttgagtttaaattcctcggctgtgaccttcccatctccattccggtcctggttggtgaacatattcttcacaatcagctcagcatcaaagccaggagcgagtttccctttgccagatgccacctgggcgtgaatgtactctgagaactcttccaggaggacttctccgttgccatccttgtcaatttcttcaaagaggttgggtgacacctcaccattccatatgaacatgtacccctcaggaaggccagccaccagctccagcagctcaatgtcaaacactaatacggcactgccgggcacttctccatccacgccagcttccccatagcccaggtgaggcggaatgatcactgtccgtttctcgccaacgcacatctctctgagacccatgtccatccccaacacaacttgcccagatcccagaacaatattgtaagttttgcctaaattccacgtggagtccagcagggtcccatccagaagtgaggcattgtagtgatatttgaggtaatctcccttcttactcagcactgagcagtcagggggtttgtagtgggaggtgatgctgatggagtccgaagggttgtggaagtcgatcacatggatgtcaaacaccagcacagccgagccggggatattccctcttccttcctctccataccccaggtgaggcgggaccacaatccttcgcttttctccaatgcaaacaccaagtagaccttcatccatcccaggaatcacgtagccctgcccaatgtacgtgtcaaacgtgcggttccgagagtagctggaatcaaagagggtgccatccagaagcgtgccattgtaatgatacctgagaaagtccccactttgacttatccgctcacagttttcaggtactaccttgttctcaatggaaatgctgtccttggggttatggaggtccaataatgcaacatcaaacaccagagatgcctgaccgggaatgtctttcccatctccatcctctccataggccagaaaaggaggaatggtgatgatgcgcttctcacccacacacatccccagcagccctttatccattccaggaatcagccagccaattcccacatacgtgtcatatgttttcatgcgattgtgactcgaatcaaacagagttccgtccaggaacgtcccgttgtagtggtacctcacaaaatcagacacctggatggtccgagggcaactcgggggcttgaaataggtgtgaatctgaacctggtcttcagaattccaaatatccatcagaagtacatcaaaatgaagcactgaattgggggggatcacaccagaaactccttcatttccgtaggcaagctttgggggaatcttcacgaaacgtctctcgtttacgcacatcccaacaagagcctggtccatccctgtgatcagctgtccttttcccacaaacacattgaaagtggagtctctgtcatagctggagtcgaacttctggccgtcggggaacgtcccnacgtagtggtagcgcacgaagtcgccnntngcgcacggtgcgcgggcactcgtcgggcacgaagcgccgctcgatctgcanntccgcgtcggagcccaggcccgccacgggcgctgcctgcccggtcacccagagcagcagcaggagcagcggtggcggcgggggcctccagccccggaacgccatcggggcggcgagaagagtggcgcggacgcagcgcggcgctcgggcggcacgggtcggcctgggcgttcggctgcgtttgcaaacgtggnccgggtctcctggccctacccgggctgcagccgccaccc

SEQ ID NO: 191 - DNA, 6934 bp, Homo sapiens
  modified_base (1128)..(1128): a, c, g, or t
  modified_base (1158)..(1158): a, c, g, or t
  modified_base (1266)..(1266): a, c, g, or t
  modified_base (1339)..(1339): a, c, g, or t
  modified_base (1341)..(1342): a, c, g, or t
  modified_base (1421)..(1421): a, c, g, or t
  modified_base (1531)..(1531): a, c, g, or t
  modified_base (1608)..(1608): a, c, g, or t
  modified_base (1617)..(1617): a, c, g, or t
  modified_base (1644)..(1644): a, c, g, or t
  modified_base (1647)..(1647): a, c, g, or t
  modified_base (1653)..(1656): a, c, g, or t
  modified_base (1935)..(1935): a, c, g, or t
  modified_base (1965)..(1965): a, c, g, or t
  modified_base (1974)..(1974): a, c, g, or t
  modified_base (2143)..(2143): a, c, g, or t
  modified_base (2297)..(2297): a, c, g, or t
  modified_base (2537)..(2537): a, c, g, or t
  modified_base (2802)..(2802): a, c, g, or t
  modified_base (3897)..(3897): a, c, g, or t
  modified_base (4442)..(4442): a, c, g, or t
  modified_base (4602)..(4602): a, c, g, or t
  modified_base (4791)..(4792): a, c, g, or t
  modified_base (4951)..(4951): a, c, g, or t
  modified_base (5054)..(5054): a, c, g, or t
  modified_base (5134)..(5140): a, c, g, or t
  modified_base (5239)..(5239): a, c, g, or t
  modified_base (5626)..(5627): a, c, g, or t
  modified_base (5629)..(5631): a, c, g, or t
  modified_base (5638)..(5638): a, c, g, or t
  modified_base (6123)..(6127): a, c, g, or t
  modified_base (6130)..(6133): a, c, g, or t
  modified_base (6137)..(6137): a, c, g, or t
  modified_base (6141)..(6141): a, c, g, or t
  modified_base (6143)..(6148): a, c, g, or t
  modified_base (6154)..(6155): a, c, g, or t
  modified_base (6157)..(6157): a, c, g, or t
  modified_base (6160)..(6161): a, c, g, or t
  modified_base (6163)..(6164): a, c, g, or t
  modified_base (6262)..(6262): a, c, g, or t
  modified_base (6286)..(6286): a, c, g, or t
  modified_base (6296)..(6296): a, c, g, or t
  modified_base (6315)..(6315): a, c, g, or t
  modified_base (6331)..(6332): a, c, g, or t
  modified_base (6336)..(6336): a, c, g, or t
  modified_base (6339)..(6340): a, c, g, or t
  modified_base (6358)..(6358): a, c, g, or t
  modified_base (6365)..(6367): a, c, g, or t
  modified_base (6369)..(6369): a, c, g, or t
  modified_base (6371)..(6383): a, c, g, or t
  modified_base (6387)..(6388): a, c, g, or t
  modified_base (6390)..(6390): a, c, g, or t
  modified_base (6405)..(6405): a, c, g, or t
  modified_base (6460)..(6460): a, c, g, or t
  modified_base (6563)..(6563): a, c, g, or t
  modified_base (6929)..(6929): a, c, g, or t
cgccgagtccgacttgcagctggcccagatcaaatgcaacctgggccgggccgtgcagctccaagagctgtggcccgggggcctcttctggaccaggaaactctccacatatattcgactttatgggagaaaatttagcaaagaagatcatgttctttttattaagttattgtatgagctggtatcaattccaaaactggaaatcagcatgatgcagggatttgcccgccttttgatcaacttgttaaagaaaaaggaacttctttcaagagctgatttggagttaccctggagaccactttatgacatggtagaaagaatattatattccaagacagagcacctaggattaaattggtttcctaattctgtagaaaatattctcaaaacactcgtgaaaagctgccgaccatattttccagcagatgccaccgctgagatgctagaagaatggcgacctttaatgtgcccttttgatgtaaccatgcaaaaggccatcacttattttgaaatatttcttcctacctcccttcctccagaacttcatcataaaggttttaaactttggtttgatgaattaattggcctttgggtttcagtgcaaaatctcccacaatgggaggggcaactagtaaatctctttgctcgattggctacagataatatagggtacatagattgggatccatatgtaccaaagatatttacaagaattctgagaagcttgaacctcccagtgggaagcagtcaagtgttagtcccaagatttttaacaaatgcttatgatataggacatgctgtaatatggatcaccgccatgatgggtggaccaagtaagctagtgcaaaaacacttagctggtttgtttaacagcatcacatctttttaccatccttcaaataatgggcgctggctgaacaagttaatgaaactacttcagcggttgccaaacagtgttgttagaagattgcatcgtgaaagatacaagaagccctcttggttaactcctgtgcctgatagccacaagcttactgatcaagatgttacagactttgtacaatgcattattcagcctgtcctcttggctatgtttagcaaaaccggtagtctagaagcagcccaggcttngcagaatcttgcactcatgagacctgaatnggtaataccccctgtacttgaaagaacatatcctgcattagagacattaacagaacctcaccagctcacagctactttaagttgtgtaattggagtagcccgcagttnggtatcaggaggcagatggtttcctgaaggtcctacacatatgctacctctgttgatgagagcattgcctggngnngatccaaatgactttagtaaatgcatgatcacattccagttcatagcaacattttctactctggtgcctttagtagatngttcatctgtactacaagaaagaaatgacctcacagaagtggaacgagaactttgttcagccacagctgaatttgaggatttcgtcttacagtttatggacagatgtttnggacttatagaaagtagcacattggagcaaacaagagaagagacagaaactgagaaaatgacacacttggagagttnggtcgaatnaggtctgtcttctacgtttagtacaantcntcaccnnnngttccaaagaaatatttatggtggcccttcagaaggtttttaatttttctacttcacatatatttgaaacaagagtagcaggtcgcatggtggcagacatgtgccgcgctgctgtaaagtgctgcccagaagaatctttgaagctctttgttccccactgctgcagtgttataactcagcttacaatgaatgatgatgtattaaatgatgaagagctagacaaggaattactatggaatcttcaacttttgtctgagattactcgagtggatggaaggnagttgcttctttatagggagcagcttgtanagattctcncaaagaaccctacatttaacctgtaagcagggttacactctgtcttgtaaccttttgcatcatcttctccgttctaccacacttatctaccctacagaatactgcagtgtgccaggtggctttgacaagcctccttctgaatactttcctatcaaggactggggcaaanccggggacttgtggaatctgggaatccagtggcatgttccttcttcagaagaagtgtcttttgccttttatcttttggactcctttcttcagcctgagctcgtcaaactccagcattgtggggatggaaaacttgaaatgtctagagatgatantctacagagtctgactatagtgcacaactgtttaattggctctggaaacctcctacctccgttgaaaggagagccagttactaacttagtaccaagtatggtgtccttggaagagacaaagttgtatactggacttgaatatgatctgtctcgagagaaccaccgagaagtaattgctacagttataaggaaacttcttaaccacatacttgataattcagaagatgatactaagtcatngtttcttattataaagattattggagaccttttacaattccaaggatctcacaagcatgaatttgactcccgatggaaaagcttcaacttagtaaagaaatcaatggaaaatcggctccatgggaaaaaacaacatatcagagcactgttgattgatagagtaatgttacagcatgagctacggacactaactgttgagggttgtgaatacaaaaagatacatcaagatatgatcagagatcttcttcgtttatctacaagttcntacagtcaggtgagaaataaggctcagcaaacattttttgctgccttgggagcatataacttctgttgcagagatatcattcccttggttttggagttcttaaggcctgatagacaaggtgttacacagcaacaattcaagggtgccttgtactgtctccttggaaatcacagtggtgtgtgcttggcaaaccttcatgattgggactgtattgtacagacgtggccagcgattgtttcttcagggcttagccaagcaatgtccctggaaaagccatcaatagtgagattgtttgatgatcttgcagaaaagattcataggcagtatgaaacaattggcttggacttcacaattccaaagtcatgtgttgaaatagcggaattacttcaacagtcaaaaaacccctctatcaaccagatattgcttagcccagaaaaaattaaggaaggaattaaacgccaacaggaaaagaatgccgatgccctaaggaactatgaaaatttggtagacaccttgctagatggtgtggagcaaagaaacctgccctggaaatttgaacatataggcattgggcttctgtctctactgctgagagatgaccgagtgttgcctcttcgtgccatacggttttttgttgagaatctcaaccatgatgcaattgtagttcgaaagatggctatctcagctgttgctggtatccttaaacagctaaaaagaacccacaaaaagctgaccattaacccctgtgaaatcagtggatgccctaaacccacccaaattattgctggtgataggcctgataatcattggttgcattatgacagcaaaactataccaagaactaaaaaagaatgggagtcaagttgctttgtggaaaaaactcactggggatactacacctggccaaagaatatggttgtttatgctggtgtggaagagcagcctaagcttggcagaagcagggaggatatgacagaggcagaacagattatatttgatcatttttctgatcctaaatttgttgagcagttaattacttttctatcattagaagacagaaaaggaaaagataagtttaatccacgacgtttttgnctctttaagggtatattcaggaattttgatgatgccttcctgccagttctgaagccccatttagaacatttggttgcagattcacatgaaagcacccagcgatgtgttgcagaaattatagctggtttaatcagaggttctaagcactggacatttgaaaaggtggagaagctttgggagcttctgtgccctctgcttagaacagcactgtccaatattaccgtagaaacttataatgactggggagcttgtatagcaacatcctgtgaaagcagagatccccggaaacttcactggctttttgaactgctgttggaatcaccattgagtggtgaaggaggatcctttgtagatgcatgtcgactttatgtactacaaggtggccttgcccagcaagaatggagagtgcctgaactattgcacagactactgaagtacttggaacccaaactcacccaggtttacaaaaatgtcagagaaagaataggaagtgtgctgacctacatattcatgatagatgtatctttgccaaataccacaccaanccatatcgcctcatgtccctgagtttactgctcgaattctggagaaattgaaacctctcatggatgtggatgaagaaattcagaaccatgttatggaagaaaatggaattggtgaagaagatgagcgaactcagggcattaaactcttgaaaaccatatngaaatggctgatggcaagtgcaggaagatccttttctacagcagttacagaacaacttcagcttctacctttgtttttcaagattgccccagtggaaaatgacaatagctacgatgaactgaaaagagatgcaaagttatgtttatcattaatgtctcaggggttgctttaccctcatcaagtgccttnnggtacttcaggtgctaaaacaaacagcaagaagcagttcttggcatgcacgatacacagtactgacctacctccagaccatggtattttataacctctttattttcctaaacaatgaagatgcagttaaagatatcaggtggctggttataagtctttnggaggacgaacaactggaggttcgagaaatggctgctactaccttaagcggtctgctacagtgtaactttcttaccatggacagtcctatgcagattcatttngagcaactttgcaaaacaaaactacctaagaaaagaaagcgagaccctggttctgtaggagataccattccttctgcagnnnnnnnagttggtcaaacgccatgctggggtgctaggacttggtgcatgtgttctttctagtccttacgatgttcccacctggatgccccagctcctcatgaatntcagtgcacatctaaatgatcctcagcctattgagatgactgtaaaaaaaaccttatccaatttccgaaggactcaccatgacaactggcaggaacataaacagcaattcactgatgaccaactgcttgttctcaccgatcttcttgtgtcaccatgctattatgcatagaaagatgactagtcctcacttcaggctcttttcatcaaaaattccacaccctcaggtaccatctgtggtggctctctgcaagttttaaaactgcctctgctgagctctcatcattttggtggtttctgtgttagatctcgttagtctgcattccacagcttctcagttgccatttgatttcccaacttgtccggaagtgtttccagaatactgatcnntnnnttttttngaggcatctgacaaagtcacaaagtctcagactagaaataattacccagtatgatcatggcatccaagaccagagtctcagaactcattaagaaacagtttacttggaatggagaatacccatctgtaatacaggtcctgtcatttcattcatctcaaattattttgaattcttcccaaatggctgctggatttaggtggtaataggggctgtgggccataaatctgaagccttgagaaccttgggtctggagagccatgaagagggaaggaaaagagggcaagtcctgaacctaaccaatgacctgatggattgctcgaccaagacacagaagtgaagtctgtgtctgtgcacttcccacagactggagtttttggtgctgaatagagccagttgctaaaaaattgggggtttggtgaagaaatctgattgttgtgtgtattcaatgtgtgattttaaaaataaacagcaacaacaataaaaannnnnaannnnaaanaaanannnnnnaaaaannanaannannttttgaccctctgaaaattattatacttcacctaaatggaagactgctgtgtttgtggaaattttgtaattttttaatttattttattctctctcccntttttattttgcctgcagaatcgnttgagagacntaataaggcttaatatttnaattgatttgtttaannatgntannataaatgtaaaagagtgntataaannngnannnnnnnnnnnnncaanncnattgtacagatgcanccttttacacaacatcattgtgtaatttgtaaagattcacgtgtagttctttatnatagtgattttgggctttgtacccactgaatgccattttttgtgtttttaaattattttctttatcttgttacaaaaactgagatgtggggtttttttttttncagttcacttatcattagaatgtctgaacttttatgtaacatttttgtgtgcatctctcaatgctaacaccacatgtttgcctatgacaagtttatagagtgaaaggtatcttctgggttgaaataattcacaaattggtgaatgtcatcttgcaacacaccctgtacagtcttccttaaaggaacactacagtatatttttagtatctacatgctgaatgactgaatacagacctaagcacagcagtggtcctggtacagtatttaagtgtcggcatacacaggcgtaatccctgtataaagtagtgccaaactgatttcagttgtgtaactagtttaaaacccaataaatggattctttttaanaaaaa

SEQ ID NO: 192 - DNA, 2272 bp, Homo sapiens
  modified_base (117)..(117): a, c, g, or t
  modified_base (120)..(120): a, c, g, or t
  modified_base (122)..(122): a, c, g, or t
  modified_base (124)..(124): a, c, g, or t
  modified_base (126)..(129): a, c, g, or t
  modified_base (143)..(145): a, c, g, or t
  modified_base (148)..(148): a, c, g, or t
  modified_base (152)..(153): a, c, g, or t
  modified_base (595)..(595): a, c, g, or t
  modified_base (1197)..(1198): a, c, g, or t
  modified_base (1215)..(1215): a, c, g, or t
  modified_base (1219)..(1219): a, c, g, or t
  modified_base (1232)..(1232): a, c, g, or t
  modified_base (1234)..(1234): a, c, g, or t
  modified_base (1240)..(1242): a, c, g, or t
  modified_base (1250)..(1253): a, c, g, or t
  modified_base (1258)..(1259): a, c, g, or t
  modified_base (1287)..(1287): a, c, g, or t
  modified_base (1333)..(1334): a, c, g, or t
  modified_base (1369)..(1369): a, c, g, or t
  modified_base (1381)..(1381): a, c, g, or t
  modified_base (1385)..(1388): a, c, g, or t
  modified_base (1390)..(1390): a, c, g, or t
  modified_base (1396)..(1397): a, c, g, or t
  modified_base (1399)..(1399): a, c, g, or t
  modified_base (1417)..(1418): a, c, g, or t
  modified_base (1584)..(1584): a, c, g, or t
  modified_base (2199)..(2202): a, c, g, or t
  modified_base (2205)..(2209): a, c, g, or t
gtaaattcacaaagctttggaaggagaagcaataaatttttgttttcaaatggcttgatgtaccttttttcctgttgctcttgaaatatgtttaactcctcatgagagaaccctggnttntntntnnnntttttttttttttnnnttntttnntggtcagcagctacctttatttggatcacacacgtgagtcagacagtaccactaatcgggccaatatggcttgtgagcaaaatgggtgaaaatagagggaactgactgggacctgttgtctaacatcattttaaggttgaacttgagcaaagacttagagaaagctgatggaatgccaagcatcaacgtgaagagaccctctatgcacacagtggatatgttatgcctggctgtagccaccttctcttctgaaaacaagatgggaatgacggaactgtattaaaagattaagttatccactagggagcatactagcacacttccagatcagccttgagatgctagacttcagatacagggacttgtgtcaggtggcctctagaaatgtggaagactaagatttagaaataaactaatttaaaagcaaacaaacaaaaaaaanctttcgcctaggatgatctgtttacaacagaaacaaaaacattttccagtttaatccatttgactgaaagtcattgttgggctgacccttaaggaaaacttaagtttaaacttcctttgcatagtatgttttctcttttttccttgggttagaggtgggaacaagaaaacattgatatagttttgaattaacattaaagaggcaaaatttcacatttaaaatggcccaaaatatcccactattcattttgctgacaggtgatacactcttgagaatcaggagtggagggtttagtcataagcatatatgctgtgggtcaggtgactcatgaacatgtcaaacaggccatgttctttagcagtttctggtctggtcctgcttttagtaatcttgcggtggaactcaggcacacagttatttggtaccacttccttataacctagcccacacccctttgcccaccctcaagccgatcggtctgttcatcccagtgcccttagaaggtgaaggtttgggctgggcccagtggttcacgtctgtaatcccagcacttagggagactgaggtgggcagatcacttgagcctaggcgttcgagaccannacctgggcaacatggcnaaanccctgtctccacnancacacnnnaaaaaaannnnaaacnnaattagccatacgtgttggtacacaccntgtagttctagctacttgggaggctaaggaagatggcttgagcccnnggaggcggaggttgcagtgagccgagatcatgccnctgccctttacntccnnnncntgggcnnancagagtgagactgtcttnnaaaaaaaaaaaaaaatggaagaaggtgagggtttgacatggttcctgacaccatcttgctcttgtgcattgctgccagtgtttcaaatgctgctgaagacgtgggttctgagcagtgttccttgtattgtatccaacaagcaaccaccctgtaggcatctctaccntgggccagtggttgtttccttcattttttttttcttttctcttcatacttgtagtaggggctccgcaacatgaaaattaaaagtatgaatgggatgagtaagtagggggcatagacagacacaagggttaaccgttcatgcaaagtctcaggtctttgtcccttgaaaccactggctttggagaaatcctcaaacagaaatgtggagagtatcggaattaaggttgtcatggtgtgaacagagtagatgattgcaggagttcgaatccacttgcagcttcctttgaggaaggcatacgttgcaatgggaaagaaaggcagctgaaacacaagctcgcaaaacagaaaggacttaaaccaggctgggggctcctgtagcagtgggtctttgaactccttagcataccacttcagcaggtttctaaactcgactgggtagagctcgcgcggcagcaccgcctgcaggtccatgaacagggtgatggggatgtggctgaggaagtagaggcccagcagccactccacgcagcgcctggttgccggagcccccatagtctgtcggttgggcctggacccgctgatgtgagaagaggggccaaatccgcgcgccttcccnnnnccnnnnncctcggtcgccgccttgcccccgcgagggctaggcagaccgcttccattggctggcgagaaga

SEQ ID NO: 193 - DNA, 1131 bp, Homo sapiens
  modified_base (27)..(27): a, c, g, or t
  modified_base (44)..(44): a, c, g, or t
  modified_base (58)..(59): a, c, g, or t
  modified_base (65)..(65): a, c, g, or t
  modified_base (69)..(69): a, c, g, or t
  modified_base (83)..(83): a, c, g, or t
  modified_base (85)..(86): a, c, g, or t
  modified_base (90)..(90): a, c, g, or t
  modified_base (122)..(122): a, c, g, or t
  modified_base (138)..(139): a, c, g, or t
  modified_base (179)..(179): a, c, g, or t
  modified_base (183)..(183): a, c, g, or t
  modified_base (187)..(187): a, c, g, or t
  modified_base (208)..(208): a, c, g, or t
  modified_base (224)..(224): a, c, g, or t
  modified_base (349)..(350): a, c, g, or t
  modified_base (355)..(355): a, c, g, or t
  modified_base (362)..(379): a, c, g, or t
  modified_base (382)..(385): a, c, g, or t
  modified_base (388)..(388): a, c, g, or t
  modified_base (396)..(396): a, c, g, or t
  modified_base (398)..(398): a, c, g, or t
  modified_base (1030)..(1030): a, c, g, or t
  modified_base (1104)..(1104): a, c, g, or t
  modified_base (1120)..(1120): a, c, g, or t
  modified_base (1123)..(1123): a, c, g, or t
  modified_base (1128)..(1128): a, c, g, or t
gcagatgagccttccggtgtctcctcnccccagtgtgtcatttnccagcagtggaccnnagcccnacgnttacaaggactgcntnntccncggcccccaccatcatcaccacagtctgtttnggctatacttcccccnncccaccagccttgtaattggctaattactggagatgaatnttgntaancagaagccttcttctcttctnccatctgcttctccantatttgcccattgtacaccccccttttcctcccactgaagccccagttagtcagcagggcctagagtccctgtccccttttgagtacagccaagtgggggattccccagctcttaagtattgggnnagganccagggnnnnnnnnnnnnnnnnnnttnnnnttntttttttntnttcaggggtactgccaggtagcaggctttattgggaagggacaaagcctcaggagctgggtgccccagaggctgctgggtcttgagccacagctgcagccaatgcagcagctcgcgcctccttcttccgtttctgtttttcctccttgaggcgcttgcgctccttcttctctaggtcctggagcagctcctggaagcgggcactccttgggtccacctggtagcccaggagctcctgggcctcagcctgcagtcgggccctcctctccttgtcagcctgggccttctcccagttctcccgctgctgctgctgccagttcacaatcatctgtggcatcttggccatgcactctgcgatgtgctgctccctctcccgacgcttctgctcttcggccagctgcttcacccgcagcgactcctgcatggtcgccaggctcgggtaccattcgcgttcttcggcctccagctcccgcagctgctccggcgacggccataacgaaccggggaccaccccggaggcggcgccgtaacgcgcgaactgcttagccgcgtagcgcggtcccagctgccaccgcggggtcaggaggtcctcggggtctggccaccggggtcccggcctgcggcgcgggggcngccgcgcccggtagccacgggaacccggggccagggtcgccgccacacctagtaggctgcgtgcctgtcgcacnggacgccgccatcttngcngtgcnggc

SEQ ID NO: 194 - DNA, 467 bp, Homo sapiens
  modified_base (16)..(17): a, c, g, or t
  modified_base (29)..(29): a, c, g, or t
  modified_base (311)..(311): a, c, g, or t
  modified_base (314)..(314): a, c, g, or t
  modified_base (318)..(318): a, c, g, or t
  modified_base (321)..(321): a, c, g, or t
  modified_base (430)..(441): a, c, g, or t
  modified_base (443)..(443): a, c, g, or t
  modified_base (456)..(456): a, c, g, or t
tttttttttttttttnntttttttttttnttgagacacaaaatttaatttaatagaaattttgtttgtagttcttacattctcagtgtgagccaatctgggacccactgccccacccagaagtggcccagtcctgggggcaggggagaaagggaggggtgaaatgagaagagccccgttcttcctcagtgctggggggttggagacaccacccccttctgctgccctcctctgggctccaggaaggagagcagatgaaatctcaggcctgtggcttctccacaccactgccccccaggttggaggggagcnaanaganganagaaggggacagaggcaagaaaagatgttgatcaagaaagatgagaaccaggggtgagggctgaaggagaatcaaagataaaataccagtttaaaaaaaaaaaaaaaannnnnnnnnnnnanaaaaaaaaaaaanaaaaaaaaaaa

SEQ ID NO: 195 - DNA, 743 bp, Homo sapiens
  modified_base (1)..(1): a, c, g, or t
  modified_base (3)..(3): a, c, g, or t
  modified_base (465)..(465): a, c, g, or t
  modified_base (616)..(616): a, c, g, or t
  modified_base (618)..(618): a, c, g, or t
  modified_base (638)..(638): a, c, g, or t
  modified_base (660)..(660): a, c, g, or t
  modified_base (663)..(663): a, c, g, or t
  modified_base (671)..(671): a, c, g, or t
ntntttttttttttttttttttttttgacctggaccctctgcatctcagaaaggtttattatcaattgaaggaggtaacatgtagcctttgctggggacaaagatgcaacaagtctctgccccatcctaggtgctgccccgtgtagggctcttcccaggcccgccccccttgggcagcctggtagcgctgggctggcgtggcatcctctggctggatccttcgcggctgctgcgttccgccagggccaatgctcccccgagggcagcgctgcctttgtttctccctcgggtctcgggcacgctcgacgtgggcagagacacggccgcagggtcctggggctcgctcgctagcctctgcccggcacacatggacttgagcatctggaagacggcgaggggggccacgttcagcttcagcaggtccaccaggatcttgaacacgtcggggtcgatagcgccgcccgnccgcctgcgccagctcgtacagctccatctcctcggtgctcagcaccttcttccgccgcagcgccagcttctgccgggccgcctccagccccgggggcgccgccgaccccggcccaggccctacgccctgcgccgccatccccgcggcccncngaaaggtgcgctccgccccngccgcgccccctagcggctgcngcnccaccacncctctccctgcagcgtcaacgtctggcctcccgggctgcctggcgggaggggcgggagcgcggggacccgct

SEQ ID NO: 196 - DNA, 1735 bp, Homo sapiens
  modified_base (973)..(973): a, c, g, or t
  modified_base (1300)..(1301): a, c, g, or t
  modified_base (1480)..(1480): a, c, g, or t
  modified_base (1492)..(1492): a, c, g, or t
  modified_base (1497)..(1497): a, c, g, or t
  modified_base (1508)..(1508): a, c, g, or t
  modified_base (1519)..(1520): a, c, g, or t
  modified_base (1530)..(1530): a, c, g, or t
  modified_base (1537)..(1537): a, c, g, or t
  modified_base (1552)..(1552): a, c, g, or t
  modified_base (1566)..(1566): a, c, g, or t
  modified_base (1568)..(1568): a, c, g, or t
  modified_base (1607)..(1607): a, c, g, or t
  modified_base (1660)..(1660): a, c, g, or t
  modified_base (1675)..(1675): a, c, g, or t
ttttttttttttttttttttttttttttttttttttctgtagcatagctcattttattgtttaaacagtttttgcataggaaatatatccgcttccagtaattgactgcagtatgagcagctgctagcagtataggctggatataacagtaacaatcacattaagtcaagcttgatttacaccagtttaaaacttgtggcaattgagttcatttgcaacccacaaaaagtacccaaagaacgttatcctccaaccgggcacaataaaaccttcactaacattctggcccagtctggggttgatcccagaggcctgaactctagaaattaagtaactgtcgtataatacatcctactgctaaaggtttgttacatggagattgtgcatgtgcctccttttgtaaaaaaatttaattaaaatacaaggttctgtatttatggcccatgaggacaaaatgccaaaagttttaaaatggatcaaccctggtgtgtagctagcaagcaataactgactactcgtcacctacagttgtactaaatgtatctaaagaaacacacagtcctacaaaagttgttctcagagaaatatcattgaggtgggggcagctcttcccaggatgctaaaagttctatatgatataagcacaaattaacagcttgatgaagacataatctactgcagctttgagaaacctatgcctgggatgtagttacccctcacattctacaatgttgtagagattttttttcccaagaaaatgtcatttgaaacatatttacaactgaactcaacagagactgtgaaattgaacaggcactgctcatttgtttgagttttttggtaaacattttgctggtttttttttttttgtttgtttctttcttgttttgcatcaacttttatcagtccatgcaacttcaatgccctcgatgaaggatgcataaaaagccatacttcttaaaaaaaaaaaaangaaaaaaaaagacttccttctgcataaagagatatatttgccacatcagtccctgtagcacagttttcaaaaccattctgtcaaaaatacagtaatacaagactggctttagtgtcactagcttacactgcttttcatgtatttaggccacctgttgttcctggtactgtatcatgcaataagtcatcaagggcttagtctagtgtaccggtaagctagtggcactgaagcgcttttcacaatctcaacatacatttgaattgcaacacacagatatttctagagtattaactagtgaacccttttattattaaaaaaaaaaaaaannctacttacaaccattgaagaaaaaattgcaacaaaaaatgtaaaaattgaccgtctccaacttgtcccctttactattaacaatgtgaccaacagatctgtggcacggacacagtacaaagagttgtcatggcaatgagtttggctgatgcaaaggtcattgtgcagggtcaaagggcnaaaatcagtggnccatngttaccccccnactgcagggcnntccactccanccacacnattttagggaattanaaaaaacagggganantaccagaaagtgccaaatatgaagaaggcagctttcagntccttcagcatggagtagaacattcatttttgagcttttactattgaacttgnatagcctgcacattnaaaaaaaaaaaaaaaaaaaaagggcggccggctcgcgatctagaactagtcggacgcgtg

SEQ ID NO: 197 - DNA, 1735 bp, Homo sapiens; identical to SEQ ID NO: 196
  modified_base (973)..(973): a, c, g, or t
  modified_base (1300)..(1301): a, c, g, or t
  modified_base (1480)..(1480): a, c, g, or t
  modified_base (1492)..(1492): a, c, g, or t
  modified_base (1497)..(1497): a, c, g, or t
  modified_base (1508)..(1508): a, c, g, or t
  modified_base (1519)..(1520): a, c, g, or t
  modified_base (1530)..(1530): a, c, g, or t
  modified_base (1537)..(1537): a, c, g, or t
  modified_base (1552)..(1552): a, c, g, or t
  modified_base (1566)..(1566): a, c, g, or t
  modified_base (1568)..(1568): a, c, g, or t
  modified_base (1607)..(1607): a, c, g, or t
  modified_base (1660)..(1660): a, c, g, or t
  modified_base (1675)..(1675): a, c, g, or t

SEQ ID NO: 198 - DNA, 1192 bp, Homo sapiens
  modified_base (2)..(11): a, c, g, or t
  modified_base (13)..(13): a, c, g, or t
  modified_base (15)..(17): a, c, g, or t
  modified_base (432)..(432): a, c, g, or t
  modified_base (442)..(442): a, c, g, or t
  modified_base (700)..(700): a, c, g, or t
  modified_base (714)..(716): a, c, g, or t
  modified_base (721)..(721): a, c, g, or t
  modified_base (727)..(727): a, c, g, or t
tnnnnnnnnnntntnnntttttttttttttttttttttttccctcttgtgctcagtcgccctgttcttgaggtctcttttctctactccatggttctcaatttatttggggggaaataccttgagcagaatacaatgggaaaagagtctctacccctttctgttcgaagttcatttttatcccttcctgtctgaacaaaaactgtatggaatcaacaccaccgagctctgtgggaaaaaagaaaaacctgctcccttcgctctgctggaagctggagggtgctaggcccctgtgtagtagtgcatagaattctagcttttttcctcctttctctgtatattgggctcagagagtacactgtgtctctatgtgaatatggacagttagcatttaccaacatgtatctgtctactttctcttgtttaaaaaaanaaaaaaaaancttaaaaaaatggggttatagaaggtcagcaaagggtgggtttgagatgtttgggtgggttaagtgggcattttgacaacatggcttctcctttggcatgtttaattgtgatatttgacagacatccttgcagtttaagatgacacttttaaaataaattctctcctaatgatgacttgagccctgccactcaatgggagaatcagcagaacctgtaggatcttatttggaattgacattctctattgtaattttgtncctgtttatttttnnnttttntttttntttcactggaaaggaaagatgatgctcagttttaaacgttaaaagtgtacaagttgctttgttacaataaaactaaatgtgtacacaaaggatttgatgcttttctctcagcataggtatgcttactatgaccttccaagtttgacttgtataacatcactgtcaaactttgtcaccctaacttcgtattttttgatacgcactttgcaggatgacctcagggctatgtggattgagtaatgggatttgaatcaatgtattaatatctccatagctgggaaacgtgggttcaatttgccattggtttctgaaagtattcacatcatttgggataccagatagctcaatactctctgagtacattgtgcccttgatttttatctccaagtggcagtttttaaaattggccttttacctggatataaattaattgtgcctgccaccaccatccaacagacctggtgc

SEQ ID NO: 199 - DNA, 6691 bp, Homo sapiens
  modified_base (276)..(279): a, c, g, or t
  modified_base (285)..(285): a, c, g, or t
  modified_base (726)..(729): a, c, g, or t
  modified_base (732)..(732): a, c, g, or t
  modified_base (735)..(736): a, c, g, or t
  modified_base (868)..(868): a, c, g, or t
  modified_base (1207)..(1207): a, c, g, or t
  modified_base (1212)..(1212): a, c, g, or t
  modified_base (1471)..(1471): a, c, g, or t
  modified_base (3905)..(3905): a, c, g, or t
  modified_base (4034)..(4034): a, c, g, or t
  modified_base (4951)..(4951): a, c, g, or t
  modified_base (5086)..(5086): a, c, g, or t
  modified_base (5810)..(5810): a, c, g, or t
  modified_base (5817)..(5817): a, c, g, or t
  modified_base (5874)..(5875): a, c, g, or t
  modified_base (5884)..(5884): a, c, g, or t
  modified_base (5889)..(5889): a, c, g, or t
  modified_base (5891)..(5891): a, c, g, or t
  modified_base (5898)..(5898): a, c, g, or t
  modified_base (5908)..(5908): a, c, g, or t
  modified_base (5924)..(5924): a, c, g, or t
  modified_base (6004)..(6004): a, c, g, or t
  modified_base (6639)..(6641): a, c, g, or t
atgaaatggaaacatgttccttttttggtcatgatatcactcctcagcttatccccaaatcacctgtttctggcccagcttattccagaccctgaagatgtagagagggggaacgaccacgggacgccaatccccacctctgataacgatgacaattcgctgggctatacaggctcccgtcttcgtcaggaagattttccacctcgcattgttgaacacccttcagacctgattgtctcaaaaggagaacctgcaactttgaactgcaaagctgannnncgcccnacacccactattgaatggtacaaagggggagagagagtggagacagacaaagatgaccctcgctcacaccgaatgttgctgccgagtggatctttatttttcttacgtatagtacatggacggaaaagtagacctgatgaaggagtctatgtctgtgtagcaaggaattaccttggagaggctgtgagccacaatgcatcgctggaagtagccatacttcgggatgacttcagacaaaacccttcggatgtcatggttgcagtaggagagcctgcagtaatggaatgccaacctccacgaggccatcctgagcccaccatttcatggaagaaagatggctctccactggatgataaagatgaaagaataactatacgaggaggaaagctcatgatcacttacacccgtaaaagtgacgctggcaaatatgtttgtgttggnnnntancannatggttggggaacgtgagagtgaagtagccgagctgactgtcttagagagaccatcatttgtgaagagacccagtaacttggcagtaactgtggatgacagtgcagaatttaaatgtgaggcccgaggtgancctgtacctacagtacgatggaggaaagatgatggagagctgcccaaatccagatatgaaatccgagatgatcataccttgaaaattaggaaggtgacagctggtgacatgggttcatacacttgtgttgcagaaaatatggtgggcaaagctgaagcatctgctactctgactgttcaagaacctccacattttgttgtgaaaccccgtgaccaggttgttgctttgggacggactgtaacttttcagtgtgaagcaaccggaaatcctcaaccagctattttctggaggagagaagggagtcagaatctacttttctcatatcaaccaccacagtcntccanccgattttcagtctcccagactggcgacctcacaattactaatgtccagcgatctgatgttggttattacatctgccagactttaaatgttgctggaagcatcatcacaaaggcatatttggaagttacagatgtgattgcagatcggcctcccccagttattcgacaaggtcctgtgaatcagactgtagccgtggatggcactttcgtcctcagctgtgtggccacaggcagtccagtgcccaccattctgtggagnaaggatggagtcctcgtttcaacccaagactctcgaatcaaacagttggagaatggagtactgcagatccgatatgctaagctgggtgatactggtcggtacacctgcattgcatcaacccccagtggtgaagcaacatggagtgcttacattgaagttcaagaatttggagttccagttcagcctccaagacctactgacccaaatttaatccctagtgccccatcaaaacctgaagtgacagatgtcagcagaaatacagtcacattatcgtggcaaccaaatttgaattcaggagcaactccaacatcttatattatagaagccttcagccatgcatctggtagcagctggcagaccgtagcagagaatgtgaaaacagaaacatctgccattaaaggactcaaacctaatgcaatttaccttttccttgtgagggcagctaatgcatatggaattagtgatccaagccaaatatcagatccagtgaaaacacaagatgtcctaccaacaagtcagggggtggaccacaagcaggtccagagagagctgggaaatgctgttctgcacctccacaaccccaccgtcctttcttcctcttccatcgaagtgcactggacagtagatcaacagtctcagtatatacaaggatataaaattctctatcggccatctggagccaaccacggagaatcagactggttagtttttgaagtgaggacgccagccaaaaacagtgtggtaatccctgatctcagaaagggagtcaactatgaaattaaggctcgccctttttttaatgaatttcaaggagcagatagtgaaatcaagtttgccaaaaccctggaagaagcacccagtgccccaccccaaggtgtaactgtatccaagaatgatggaaacggaactgcaattctagttagttggcagccacctccagaagacactcaaaatggaatggtccaagagtataaggtttggtgtctgggcaatgaaactcgataccacatcaacaaaacagtggatggttccaccttttccgtggtcattccctttcttgttcctggaatccgatacagtgtggaagtggcagccagcactggggctgggtctggggtaaagagtgagcctcagttcatccagctggatgcccatggaaaccctgtgtcacctgaggaccaagtcagcctcgctcagcagatttcagatgtggtgaagcagccggccttcatagcaggtattggagcagcctgttggatcatcctcatggtcttcagcatctggctttatcgacaccgcaagaagagaaacggacttactagtacctacgcgggtatcagaaaagtcccgtcttttaccttcacaccaacagtaacttaccagagaggaggcgaagctgtcagcagtggagggaggcctggacttctcaacatcagtgaacctgccgcgcagccatggctggcagacacgtggcctaatactggcaacaaccacaatgactgctccatcagctgctgcacggcaggcaatggaaacagcgacagcaacctcactacctacagtcgcccagctgattgtatagcaaattataacaaccaactggataacaaacaaacaaatctgatgctccctgagtcaactgtttatggtgatgtggaccttagtaacaaaatcaatgagatgaaaaccttcaatagcccaaatctgaaggatgggcgttttgtcaatccatcagggcagcctactccttacgccaccactcagctcatccagtcaaacctcagcaacaacatgaacaatggcagcggggactctggcgagaagcactggaaaccactgggacagcagaaacaagaagtggcaccagttcagtacaacatcgtggagcaaaacaagctgaacaaagattatcgagcaaatgacacagttcctccaactatcccatacaaccaatcatacgaccagaacacaggaggatcctacaacagctcagaccggggcagtagtacatctgggagtcaggggcacaagaaaggggcaagaacacccaaggtaccaaaacagggtggcatgaactgggcagacctgcttcctcctcccccagcacatcctcctccacacagcaatagcgaagagtacaacatttctgtagatgaaagctatgaccaagaaatgccatgtcccgtgccaccagcaaggatgtatttgcaacaagatgaattagaagaggaggaagatgaacgaggccccactccccctgttcggggagcagcttcttctccagctgccgtgtcctatagccatcagtccactgccactctgactccctccccacaggaagaactccagcccatgttacaggattgtccagaggagactggccacatgcagcaccagcccgacaggagacggcagcctgtgagtcctcctccancaccacggccgatctcccctccacatacctatggctacatttcaggacccctggtctcagatatggatacggatgcgccagaagaggaagaagacgaagccgacatggaggtagccaagatgcaaaccngaaggcttttgttacgtgggcttgagcagacacctgcctccagtgttggggacctggagagctctgtcacggggtccatgatcaacggctggggctcagcctcagaggaggacaacatttccagcggacgctccagtgttagttcttcggacggctcctttttcactgatgctgactttgcccaggcagtcgcagcagcggcagagtatgctggtctgaaagtagcacgacggcaaatgcaggatgctgctggccgtcgacattttcatgcgtctcagtgccctaggcccacaagtcccgtgtctacagacagcaacatgagtgccgccgtaatgcagaaaaccagaccagccaagaaactgaaacaccagccaggacatctgcgcagagaaacctacacagatgatcttccaccacctcctgtgccgccacctgctataaagtcacctactgcccaatccaagacacagctggaagtacgacctgtagtggtgccaaaactcccttctatggatgcaagaacagacagatcatcagacagaaaaggaagcagttacaaggggagagaagtgttggatggaagacaggttgttgacatgcgaacaaatccaggtgatcccagagaagcacaggaacagcaaaatgacgggaaaggacgtggaaacaaggcagcaaaacgagaccttccaccagcaaagactcatctcatccaagaggatattctaccttattgtagacctacttttccaacatcaaataatcccagagatcccagttcctcaagctcaatgtcatcaagaggatcaggaagcagacaaagagaacaagcaaatgtaggtcgaagaaatattgcagaaatgcaggtacttggaggatatgaaagaggagaagataataatgaagaattagaggaaacntgaaagctgaagacaaccaagaggcttatgagatctaatgtgaaaatcatcactcaagatgcctcctgtcagatgacacatgacgccagataaaatgttcagtgcaatcagagtgtacaaattgtcgtttttatncctcttattgggatatcattttaaaaactttattgggtttttattgttgttgtttgatccctaaccctacaaagagccttcctattcccctcgctgttggagcaaaccattataccttacttccagcaagcaaagtgctttgacttcttgcttcagtcatcagccagcaagagggaacaaaactgttcttttgcattttgccgctgagatatggcattgcactgcttatatgccaagctaatttatagcaagatattgatcaaatatagaaagttgatattcaacctcacaagggctctcaaagtataatctttctatagccaactgctaatgcaaattaaaacatatttcattttaacatgatttcaaaatcagtttttcatactaccctttgctggaagaaactaaaaatatagcaaatgcagaaccacaaacaattcgaatggggtagaaacattgtaaatatttactctttgcaaaccctggtggtattttattttggcttcatttcaatcattgaagtatattcttattggaaatgtacttttggataagtagggctaagccagttggatctctggttgtctagtcattgtcataagtaaacctagtaaaaccttgttctatttttcaatcatcaaaaagtaattataaatacgtattacaaacaagtggatgtttttaatgaccaattgagtaagaacatccctgtcttaactggccntaaattncttctggtagtgtcagttcaactttcagaagtgccacttaaggaagtttgatttttnnttttgtaangcacngnttttaanctctctctcntttttttttttttttnggttttaaaagcacaatcactaaactttatttgtaaaccattgtaactattaaccttttttgtcttattgaaaaaaaaantgttgagaagcgtttttaacctgttttgttaatgctctatgtttgtatttggaatatttgaataatgacagatggtgaagtaacatgcatactttattgtgggccatgaaccaaatggttcttacttttcctggacttaaagaaaaaaagaggtttaagtttgttgtggccaatgtcgaaacctacaagatttccttaaaatctctaatagaggcattacttgctttcaattgacaaatgatgccctctgactagtagatttctatgatccttttttgtcattttatgaatatcattgattttataattggtgctatttgaagaaaaaaatgtacatttattcatagatagataagtatcaggtctgaccccagtggaaaacaaagccaaacaaaactgaaccacaaaaaaaaaggctggtgttcaccaaaaccaaacttgttcatttagataatttgaaaaagttccatagaaaaggcgtgcagtactaagggaacaatccatgtgattaatgttttcattatgttcatgtaagaagccccttatttttagccataattttgcatactgaaaatccaataatcagaaaagtaattttgtcacattatttattaaaaatgttctcaaatacaaannnaaaaaaaaaaaaaaaaaaaaaaaaaaaaaaaaaaaaaaaaaaaaaaaaaa

SEQ ID NO: 200 - DNA, 1009 bp, Homo sapiens
  modified_base (5)..(5): a, c, g, or t
  modified_base (141)..(144): a, c, g, or t
  modified_base (146)..(152): a, c, g, or t
  modified_base (989)..(992): a, c, g, or t
tgctngaatggaatctaatgcctcatgatctgaggttgaatagcttcgtgccgaaaccatcccccacccccatcccgctaccccgagtccgtgaaaaaattgtcttccatgaagccggtccctggtaccagaaaggttggnnnncnnnnnnntaaaataccaataaatttttgaaccttaaaaactttgaagaacaaggtaaattggtgttttatttaatgtcctaccctttaatttgttgcattttcctatactctttacactattttatcccaaactatgtatatgaggtgaaaatatatatgaaaagggatactgaagaatatttagtttaaaattaatttcttacgatcacgagcacatggtggcataattacaaagcttggaagtattcaaatagaaaatcaaaggtgtttcaatacagtagaatcccaggactgcattttaaaatcgcctcacagatcacactcgctggtggcaaatatcatcatcgttgctaaaggacagaaaatactgatgtgtgttttaactaactggtatattgatccatgggaggctgcacagaagaccctgcggccaggaggggcattgtcagtggctgcttctcctgagctccacgccttcattgcagctgcatgttcgatacaatacacctgcttcacagccccatggacatccctacaggtactgtcatgtgaagccttgcctagtagttctctccagggcaaatgaagctcacagttttgcaaggtggaaacctcttattcacatttgctttgattccccgatggagtagactgcctttgttccatacaggcaaagtaaggatattttaatatcatcctacttcttattagcatttcatttgtctatgtactgtatttcatttgtatgtctcctgaaacatccaaatagagaacataagaacactttatgtacaatctggaaaaaaattacctgagaaatcaattaaagatttttcccctttnnnnaaaaaaaaaaaaaaaaa

SEQ ID NO: 201 - DNA, 1565 bp, Homo sapiens
  modified_base (372)..(375): a, c, g, or t
  modified_base (378)..(378): a, c, g, or t
  modified_base (513)..(513): a, c, g, or t
  modified_base (551)..(551): a, c, g, or t
  modified_base (1155)..(1155): a, c, g, or t
cactgttaagacctcctattgagttttccaggtcctcagatgggaattgcacagtaggatgtggaacctgtttaatgttatgaggacgtgtctgttatttcctaatcaaaaaggtctcaccacataccatgtggatgcagcacctctcaggattgctaggagctcccctgtttgcatgagaaaagtagtcccccaaattaacatcagtgtctgtttcagaatctctctactcagatgaccccagaaactgaaccaacagaagcagacttttcagaagatggtgaagacagaaacccagtaacttgcaaaaagtagacttggtgtgaagactcacttctcagctgaaattatatatatacacatatatatatnnnnttnacatctgggatcatgatagacttgttagggcttcaaggccctcagagatgatcagtccaactgaacgaccttacaaatgaggaaaccaagataaatgagctgccagaatcaggtttccaatcaacagcagtgagntgggattggacagtagaatttcaatgtccagtgagtgnggttcttgtaccacttcatcaaaatcatggatcttggctgggtgcggtgcctcatgcctgtaatcctagcactttgggaggctgaggcaggcaatcacttgaggtcaggagttcgagaccagcctggccatcatggcgaaacctcatctctactaaaaatacaaaagttaaccaggtgtgtggtgcacgtttgtaatcccagttactcaggaggctgaggcacaagaattgagtatcactttaactcaggaggcagaggttgcagtgagccgagattgcaccactgcactccagcttgggtgataaaataaaataaaatagtcgtgaatcttgttcaaaatgcagattcctcagattcaataatgagagctcagactgggaacagggcccaggaatctgtgtggtacaaacctgcatggtgtttatgcacacagagatttgagaaccattgttctgaatgctgcttccatttgacaaagtgccgtgataatttttgaaaagagaagcaaacaatggtgtctcttttatgttcagcttataatgaaatctgtttgttgacttattaggactttgaattatttctttattaaccctctgagttttngtatgtattattattaaagaaaaatgcaatcaggattttaaacatgtaaatacaaattttgtataacttttgatgacttcagtgaaattttcaggtagtctgagtaatagattgttttgccacttagaatagcatttgccacttagtattttaaaaaataattgttggagtatttattgtcagttttgttcacttgttatctaatacaaaattataaagccttcagagggtttggaccacatctctttggaaaatagtttgcaacatatttaagagatacttgatgccaaaatgactttatacaacgattgtatttgtgacttttaaaaataattattttattgtgtaattgatttataaataacaaaattttttttacaacttaaaaaaaaaaaaaaaaaaaaaaaaaa

SEQ ID NO: 202 - DNA, 829 bp, Homo sapiens
  modified_base (100)..(100): a, c, g, or t
  modified_base (102)..(102): a, c, g, or t
  modified_base (104)..(104): a, c, g, or t
  modified_base (604)..(604): a, c, g, or t
  modified_base (694)..(696): a, c, g, or t
  modified_base (741)..(741): a, c, g, or t
  modified_base (764)..(764): a, c, g, or t
  modified_base (768)..(768): a, c, g, or t
aggtcctttgtgtttcgacagtatttattaatgcagatatcagtgctacagctataaaatataccctgagcagcttgttaattctataaatgacaaagantntntttttaaaaagtcacaattttataaaaatggtttttcttacattcttttgagaactgtttcactcatacatacacccacacaccccactcaaccttgtatcaaattccaaaagtgtaactaaagtataagaatatcatgactagttaaaagatagcaaataccataaggtacaagttcaagtattagtataacaagtatctgagtaacaaatgtccttggaaatggggggtaggaggagatatgattagtcacaggtttggttaactgccctcaaaatttacaagttaaaatgttttggctggtgagcacatttcagttcttaggggaaaaaaagcttttaatggcaatttatagaaatcagaatccaggctaatgatttttatccttcacacagtaaatgcagcccatccagaatcctggagcaataaagtaagaagtaattcaaatatctgcttgtgggtcaataaaaagggtttctgaagtatcaagtcttgtgggnacagcccccaaccctaagggcaggtagtattctatctcctggctggctcatcacattcaaaacaacctgttttttttgttgttgttgttnnngttaagaaatatctcaccctcttattcaatagtgtttgaaaacanggcaatctttgtattttaaatantctnggtttgtagatagtgaattttttttttttttttttttttttttgaggcagagtctcactct

SEQ ID NO: 203 - DNA, 1844 bp, Homo sapiens
  modified_base (13)..(15): a, c, g, or t
  modified_base (51)..(51): a, c, g, or t
  modified_base (58)..(58): a, c, g, or t
  modified_base (60)..(61): a, c, g, or t
  modified_base (63)..(63): a, c, g, or t
  modified_base (72)..(74): a, c, g, or t
  modified_base (78)..(78): a, c, g, or t
  modified_base (87)..(90): a, c, g, or t
  modified_base (93)..(93): a, c, g, or t
  modified_base (95)..(95): a, c, g, or t
  modified_base (390)..(390): a, c, g, or t
  modified_base (415)..(415): a, c, g, or t
  modified_base (1024)..(1025): a, c, g, or t
  modified_base (1035)..(1036): a, c, g, or t
  modified_base (1039)..(1039): a, c, g, or t
  modified_base (1048)..(1050): a, c, g, or t
  modified_base (1054)..(1055): a, c, g, or t
  modified_base (1293)..(1293): a, c, g, or t
  modified_base (1320)..(1320): a, c, g, or t
  modified_base (1326)..(1326): a, c, g, or t
  modified_base (1372)..(1372): a, c, g, or t
  modified_base (1380)..(1380): a, c, g, or t
  modified_base (1386)..(1386): a, c, g, or t
  modified_base (1466)..(1466): a, c, g, or t
tggagcctggcgnnnagtgggggcgtgcgacggttactctggttactgggnccgcgcngnncntggcgagannngccngcccgcgannnntgncntggtgaggaagccgtcgggagccgccgccgccatctgagggaggtaccctggaaaccaccttttatcggtggggaagtgcagtcgcggtgggcggctctgggggccagcgaaacgggaggcctctaaatctttaggttggggctgcattgccctggagccgcactcttgagtccgaggccatcttttgttggagaaggcgtcggcgttggcgttttcccgaggttgggctgtacagtgtctccgtccgcggaaaaagaagcctctgaacccgcgccggcccgcagcccccgtgcnttccggccgctgctcgccgtcgccnagaggctaggccacgtttcccccagtgccgaggtgtttctgtgaccctccctccactcccattcccttctgaaagggcacctgctcttggtgagaaaagaaattatagcacgaagagccagtatcagaagagtatccatcacccgcagcaaccgctcagggaacaccatcaaaaaagaaaaaaagggaatatctggatttcctgggcgaggaggagcgagtctgctcgggagctgttccagcaggcgatttttaaatactgctttctacgccctatacaacttggcttcacatacttttacactaactttatatgatttttaaaaactggtctgatcggacttctcgtcctgggacactgtttactggagtctggccggctctccgtgctcctcttggtacctcattttggggagaaccttaaacccactcgagcagataatctccgccttgaccggtgccaccaaagaagccttggaaccatgtggacttttctgggcattgccactttcacctatttttataagaagttcggggacttcatcactttggccaacagggaggtcctgttgtgcgtgctggtgttcctctcgctgggcctggtgctctnnctaccgctgnncgncaccgaaannngggnntcctcgggcgccagcagagcggctcccagttcgccctcttctcggatattctctcaggcctgcctttcattggcttcttctgggccaaatccccccctgaatcagaaaataaggagcagctcgaggccaggaggcgcagaaaaggaaccaatatttcagaaacaagcttaataggaacagctgcctgtacatcaacatcttctcagaatgacccagaagttatcatcgtgggagctgncgtgcttggctctgctttggcagctgngctttncagagatggaagaaaggtgacagtcattgagagagacttaaaagangcctgacngaatanttggagaattcctgcagccgggtggttatcatgttctcaaagaccttggtcttggagatacagtggaaggtcttgatgcncaggttgtaaatggttacatgattcatgatcaggaaagcaaatcagaggttcagattccttaccctctgtcagaaaacaatcaagtgcagagtggaagagctttccatcacggaagattcatcatgagtctccggaaagcagctatggcagagcccaatgcaaagtttattgaaggtgttgtgttacagttattagaggaagatgatgttgtgatgggagttcagtacaaggataaagagacctccaagttcaggaaaagcctggtctccaataaagtttctgtatcatctcattttgttggctttcttatgaagaatgcaccacagtttaaagcaaatcatgctgaacttattttagctaacccgagacgagttctc

SEQ ID NO: 204 - DNA, 521 bp, Homo sapiens
  modified_base (148)..(148): a, c, g, or t
  modified_base (156)..(156): a, c, g, or t
  modified_base (159)..(159): a, c, g, or t
  modified_base (161)..(161): a, c, g, or t
  modified_base (165)..(165): a, c, g, or t
  modified_base (167)..(168): a, c, g, or t
  modified_base (172)..(173): a, c, g, or t
  modified_base (175)..(175): a, c, g, or t
  modified_base (283)..(283): a, c, g, or t
  modified_base (437)..(438): a, c, g, or t
  modified_base (494)..(494): a, c, g, or t
tttttttttgggtttccccaccccctcaatctgtcggggagcccctgcccttcacctagctcccttggccaggagcgagcgaagctgtggccttggtgaagctgccctcctcttctcccctcacactacagccctggtgggggagaanggggtggntgntncttntnntttnntnttttttttttttttttttttaattcaatctggaatcagaaagcggtggattctggcaaatggtccttgtgccctccccactcatccctggtctggtcccctgttgccnatagccctttaccctgagcaccaccccaacagactggggaccagccccctcgcctgcctgtgtctctccccaaacccctttagatggggagggaagaggaggagaggggaggggacctgccccctcctcaggcatctgggagggccctgccccnntgggctttacccttccctgcgggctctctccccgacacatttgttaaaatcaaacnctgaataaaactacaagtttaatatga

SEQ ID NO: 205 - DNA, 5187 bp, Homo sapiens
  modified_base (64)..(64): a, c, g, or t
  modified_base (66)..(66): a, c, g, or t
  modified_base (69)..(71): a, c, g, or t
  modified_base (74)..(74): a, c, g, or t
  modified_base (89)..(89): a, c, g, or t
  modified_base (522)..(522): a, c, g, or t
  modified_base (597)..(597): a, c, g, or t
  modified_base (668)..(669): a, c, g, or t
  modified_base (741)..(741): a, c, g, or t
  modified_base (920)..(920): a, c, g, or t
  modified_base (1112)..(1114): a, c, g, or t
  modified_base (1339)..(1339): a, c, g, or t
  modified_base (1458)..(1459): a, c, g, or t
  modified_base (1462)..(1464): a, c, g, or t
  modified_base (1591)..(1591): a, c, g, or t
  modified_base (2547)..(2547): a, c, g, or t
  modified_base (2554)..(2554): a, c, g, or t
  modified_base (2648)..(2648): a, c, g, or t
  modified_base (2795)..(2795): a, c, g, or t
  modified_base (2848)..(2849): a, c, g, or t
  modified_base (2851)..(2852): a, c, g, or t
  modified_base (3716)..(3716): a, c, g, or t
  modified_base (3728)..(3728): a, c, g, or t
  modified_base (3733)..(3733): a, c, g, or t
  modified_base (3873)..(3873): a, c, g, or t
  modified_base (4021)..(4021): a, c, g, or t
  modified_base (5115)..(5115): a, c, g, or t
  modified_base (5122)..(5123): a, c, g, or t
  modified_base (5125)..(5125): a, c, g, or t
  modified_base (5128)..(5129): a, c, g, or t
ttaaatatggtacaaatatattctcaaaactctgtcatctcagttctttttttttttccttttncnatnnngtnttttctttctttttnttttttttttttttaatgtcctagcttggtttggtcttgaaaagattcataatcactccaaatgaaatgctcctcccttggccaccaatgtgaagggagggtagaaacctgaggctagacttctgacacaagaagaatctgtcgagagcacagtctcccagtcaataagaaggaaggagagagggggatgagctcgcacccttgagaagaaccttcatgagccaattcccaaagcatcaactccgcatggatactttgcacacacatcagccgtgtctaatggacacacacacgtgcatacacacgtgagcacacgccgggaccacagacccttatccaaaatatgaaagcagcagctattggtcaatttgaggaactcattttgtaaagaaaaaaaaaatccttcagcctggatgagagaaaaaaaaaaaanccaaaaaaaccatcttgaagctcaacctgtaaaacttgaaattctcctggaacagggctgggtgtttttgttttnttttttctttcgaacttttgttccacaaacaggaagttttgtcttttatactgaagctcagacaccagcannaaaaaaaaaaaaaaaaaaaagaatttgtaaaaacaggtgctttctttccatctgctgggggcgggtgggggnaacgaaaaaacacaaaatcctggtttgaaaccgtcgttgccccaaaggagcagcaactgtggaaaccccttgccctccaggttcacagttaaatcctctgcaggactagttaaattggtaaccaaacgagtccaccttaagatgaacagaaatgtataggaacgatctctgaactccantggacatggtagagtcgtgagaatcctgagttttccagaggctttcaaaccagaggaaagcgaaaatgggaacccctgcccgcccccgccacggtaggcactgttaggaaggattggaccgaggcaaggtcagaatccgcccgtttttcttgcctccgttcatgtgtgtgtaagggatgtgttcctcgtagnnncgcttgaaacccagcgaggaccctccatcccggccccccgcctcctccctctgacagtgcgaggaacggtccaggggcacattctccatgtcctcaaactccatctccagctcctcactctcgggagccttgttctcctcgctgtggaagaacgacacctctggaaagctggggtgcaggtcgtccttgagcaggttgacaatctccaggaaggttggcctcatnttggggttgaattgccagcacatgcgcatgaggtcagtgactctctctggacagttgtcgggttgatccagataccctccatccatgacaaatttcaacacctgttcattagacaggcnntgnnnaggctgttctgccaagctggtgatttcccaaaggaccacgccaaaggaccacatgtcagaagaagtggtgaagaccccatccttcagggactccggtgccatccaccgtacagggagcagacccttnccccctttccggtagtaatccgtttcatagatgtctctggtcattccaaagtctccaattttgacagtaaaatcatgggcgaccatgcagtttctcgctgccaggtcccgatgcacaaacttcttggcgttcaggtaggccatcccgtcagcaatctctgccgccatctgaatcatctcttgaagggtagggggagggcggccaggattattctcagcctctggccgcagagaacggaggtagctcttcaggtctccgtgagccatcagctccatcaccaccagcgtgggctggcccttggacaccactcccaggaggcgcaccacgtgatggcaggtgaagcccttcatgaccgaggcctcattgaggaactcaatccgctctcggagactggctgactcgttgaccgtcttcaccgccacgcgggtctctgcctcacccttgatgatgtccctggcattgccctcatacaccatgccgaaggagccctgccccagctctcgaaggagggtgatcttctctcgagacacctcccactcgtccggcacgtacacagagcatggaaacacatcactggcactgagatactcagggtttgaagaagcgtaaagcggtcccagcggcccatctggctgcctctttctcaggaatagataaatacttccaatcacaacactgaagagaaagacaaagatgagggggccgatgataatttttgcaatatttgacgggacgtctaaatagtctgtcacgtagaaataggtgggttccgtccaagagccgttgcccgcaagggaggtggcccggattcgcacgctgtagttccccggtgacagcccacgcagcctgcagccccgttccagagcgaagtgcttgcgggagacgcagagatgcagctcctcatcaccatatcgccgataactcacttcatacagcacgatcagaccattgggctncttcggntcctgccacatcaagtggacgacgttgttctcaaagatttcatgcgtcacagggccaacaatgtcatcagccttggcttcaggcatggtcctcngcactgacgtaggctgccacactgcaccgttcctcaggggtgtcctggttgcaagcctgcagctcgatgcgatagcccgtgaagtgtcgcaagccggagatgaccagcgactccttgttcaccaccttctcaaaaggcctgtgctcntccggactcgtgggcacgctggtcgaggaagtgttggggaaagctgccaccgnngnnacggccaccgtcacattcccaacatcgccaagggacctgcgtttccgagatggcctggggacgaaaaccacgttgtgcaggtaatcctcaaacgtcttcctaaacgaggactcctccagctccttcaggatctgagagtctgtctttggacaggagcagcattcgccggccgaatcctcatactcactctggttgtgcttctgagaatcttcagactcgaatggtggagaccaggtcctcgagggcagcttcagccctttgaggcaataatccagctcgaacagctcactgtcttccgcctgcctctcccagaaaaccaggtagtgggtgatgttgccattggggtcggagggtggtttccacttcagaataatctgggatgatgagttagacactgagattggatccaggggcacagaggggttggtggcatctgtctggacataaatgatgtcactcttggccccataggtccggcgttcatccgaaaaggtgaccagggtcttcacaaagatggcatactgggtccagggcttgagaccccgcatcagccaccctgggtggttctgtgatttggggtcgttggacctcaggggtgggtcaatgtctaccaccgtccaactgttggaaccacatgcatcctgcccgtcgaactccgtcacattctgataaggggcctctttgtagaacagcatgaaccccaagaggtctcggaagtcggggggccagtacggctcccatctcagcaagatcttgtcaaaagatgtccgaatgtaagaaaatttaagtaactcattttcacaggatgcctggtccccattggtcttcagggcaatgtcgtttctctcctggcgccccttggtncctgaaacttcnttccnatcttgtggatttctgacaagcagagtttggggttatagtggaagaagagtttcccctgagtgatggtgaggttgtgtttgctccagtcccagagctgccttaggttctggttgtccaaggcatagaaggagtagttccnaatttccaaggtctctcctcgaatcagacgtaacttccggaagaaggaaagtgacaccagagcgtaggatcggcggatttttagataccctgaaatttcttcaatgaggccgaggttggcttctagctcagctgccagattgttgccncctcgaatgttgatgatcagactcccgttgatgacggtgcatcctcggagctcctgggcagacgtcaccgagtcgatggtcttctcgccttctaggaggtggcacaccttgggacagggacccaggcatggggtgcacagcaagttgctggaattcatcgtgtacccggagggacactcagggatgcacttgttgttgtgaatgacgtactggtggcagccctgcctccgcgagttcttgcatttgtggtgcaggtcctggcagaagctgaagttcacacagcgccagtcctggaagtggtagtacgggggcgggcaggtctccacacacctgccgtccaggtagaagttgcggcaggccacgcacttggtggggtcgtcgggctgagaacagttgcccaggcactcgctgtggcaacagaggccttcggcggtgcagccgtgtgacttacagatggtcgggcaaactttctggcagtgactatgagtccaacatcgttcgacaaactgcccgttgatgacggtggcggggcagttggtcttgcccttcgcggtacccggacagatgtctccacactcctcgttgtcatctttgttcaacacgatgtaattatcctccacggaatccaggatacgggaccagtcgatagtggccaagtaacagagctcattgttcttctcgatgcggacagaaccccgggtgatgttcatcaggttgtagaggccgagttccttgaggtgaaccatctcgaagatgaccagcgcgtagttaaagaacagtcgtgatccccggatgaccgtgaggttggggaacaggtccttcaggctctcgagcccatagacccggaagagcagcaagtaatcagtgatcatgatgagtttggggaaactgaggtctcggaaatcttcgggcctcgttttgaacatcaagagtatctgcaagtgtccttcgatgacagagcaattctccagctcatgcaacctagtgaggttgttccggatatccatgccgggacacacctctccggggtacaggtggcccgcggcgcccagtagcagcgcggccaccgccaccagcagcggcgcggccgccgncccccgnngnccnncggtgcccatggctgcgggagcgcggggtctcctcggatcagagcgcgcgctcccggt

SEQ ID NO: 206 - DNA, 680 bp, Homo sapiens
  modified_base (45)..(45): a, c, g, or t
  modified_base (123)..(123): a, c, g, or t
  modified_base (217)..(217): a, c, g, or t
  modified_base (384)..(384): a, c, g, or t
  modified_base (398)..(398): a, c, g, or t
  modified_base (659)..(659): a, c, g, or t
gggaagcgcgcgtggccgccatggcgcggaatgtggtgtaccccntgtaccggctgggtggcccacaacttcgggtgttccgaaccaacttcttcattcagctggtgcggcccggtgtggccnagcccgaggacaccgtgcagttccggatccccatggaaatgacaagggtggacctcaggaattacctcgagggcatctataacgtgcccgtggntgctgtgcggacacgggtgcagcatggctctaacaagagaagagatcacagaaacgtgaggatcaagaagccggactacaaggtcgcctacgtgcagctggcccatggacagaccttcacgttcccagatctgtttcccgagaaagacgagagccctgaaggcagcnctgccgacgacctntacagcatgctcgaggaggagaggcagcagaggcagagcagcgacccgcggcggggcggcgtccccagctggttcgggctgtgacggggtggccagcagggacgcgccccaggtgggcagctgtggcagagcagcgacccgcggcggggcggcatccccagctggttcgggccgtgacggggcggccagcagggacgcgccccaggtgggcagctgtggcagagcagtcccgacacctaaataaaagtcttgctgcagganaaaaaaaaaaaaaaaaaaaaa

SEQ ID NO: 207 - DNA, 566 bp, Homo sapiens
  modified_base (406)..(412): a, c, g, or t
  modified_base (414)..(429): a, c, g, or t
  modified_base (433)..(435): a, c, g, or t
  modified_base (522)..(526): a, c, g, or t
ctctcggtgactactatcgctgtcatgtctggtcgtggcaagcaaggaggcaaggccgcgccaaggcaagtcgcgctcgtccggctggccttcattccggagcgagtgcatcgttgctgcgaaaggcaactacgcgggcagtgggggccggcgcccgtctacatggctgcggtcctcgagtatctgaccgccgagatcctggagctggcgggcaacgcggctcgggacaacaagaagacgcgcatcatccctcgtcacctccagctggccatccgcaacgacgaggaactgaacaagctgctgggcaaagtcaccatcgcccaggggcgcgtcttgcctaacatccaggccgtactgctccctaagaagacggagagtcaccacaaggcaaagggcaagtgaggcnnnnnnncnnnnnnnnnnnnnnnncggnnncgagaagacgacagaaggggcacctgtgaactcaaaaggctcttttcagagccacccacgttttcaaataaaagagttgttaatgcnnnnnaaaaaaaaaaaaaaaaaaaaaaaaaaagtcgtatcgatgt

SEQ ID NO: 208 - DNA, 153 bp, Homo sapiens; identical to SEQ ID NO: 46
  modified_base (2)..(5): a, c, g, or t
  modified_base (11)..(11): a, c, g, or t
  modified_base (137)..(138): a, c, g, or t

SEQ ID NO: 209 - DNA, 153 bp, Homo sapiens; identical to SEQ ID NO: 46
  modified_base (2)..(5): a, c, g, or t
  modified_base (11)..(11): a, c, g, or t
  modified_base (137)..(138): a, c, g, or t

SEQ ID NO: 210 - DNA, 3135 bp, Homo sapiens
  modified_base (622)..(623): a, c, g, or t
  modified_base (625)..(631): a, c, g, or t
  modified_base (634)..(634): a, c, g, or t
  modified_base (637)..(637): a, c, g, or t
  modified_base (639)..(639): a, c, g, or t
  modified_base (642)..(642): a, c, g, or t
  modified_base (646)..(646): a, c, g, or t
  modified_base (651)..(651): a, c, g, or t
  modified_base (657)..(658): a, c, g, or t
  modified_base (662)..(663): a, c, g, or t
  modified_base (676)..(676): a, c, g, or t
  modified_base (678)..(678): a, c, g, or t
  modified_base (680)..(680): a, c, g, or t
  modified_base (686)..(686): a, c, g, or t
  modified_base (689)..(690): a, c, g, or t
  modified_base (695)..(695): a, c, g, or t
  modified_base (698)..(698): a, c, g, or t
  modified_base (701)..(701): a, c, g, or t
  modified_base (704)..(704): a, c, g, or t
  modified_base (725)..(727): a, c, g, or t
  modified_base (730)..(731): a, c, g, or t
  modified_base (740)..(740): a, c, g, or t
  modified_base (747)..(747): a, c, g, or t
  modified_base (798)..(798): a, c, g, or t
  modified_base (829)..(829): a, c, g, or t
  modified_base (836)..(836): a, c, g, or t
  modified_base (838)..(838): a, c, g, or t
  modified_base (893)..(893): a, c, g, or t
  modified_base (952)..(952): a, c, g, or t
  modified_base (968)..(968): a, c, g, or t
  modified_base (1004)..(1004): a, c, g, or t
  modified_base (1053)..(1053): a, c, g, or t
  modified_base (1072)..(1072): a, c, g, or t
  modified_base (1084)..(1084): a, c, g, or t
  modified_base (1092)..(1092): a, c, g, or t
  modified_base (1198)..(1198): a, c, g, or t
  modified_base (1253)..(1253): a, c, g, or t
  modified_base (1765)..(1765): a, c, g, or t
  modified_base (1782)..(1782): a, c, g, or t
  modified_base (1806)..(1806): a, c, g, or t
  modified_base (1811)..(1811): a, c, g, or t
  modified_base (1859)..(1859): a, c, g, or t
  modified_base (2055)..(2055): a, c, g, or t
  modified_base (2175)..(2175): a, c, g, or t
  modified_base (2178)..(2179): a, c, g, or t
  modified_base (2181)..(2182): a, c, g, or t
  modified_base (2187)..(2187): a, c, g, or t
  modified_base (2190)..(2191): a, c, g, or t
  modified_base (2193)..(2193): a, c, g, or t
  modified_base (2195)..(2195): a, c, g, or t
  modified_base (2197)..(2197): a, c, g, or t
  modified_base (2262)..(2262): a, c, g, or t
  modified_base (2264)..(2264): a, c, g, or t
  modified_base (2300)..(2300): a, c, g, or t
  modified_base (2336)..(2337): a, c, g, or t
  modified_base (2339)..(2339): a, c, g, or t
  modified_base (2354)..(2354): a, c, g, or t
  modified_base (2362)..(2362): a, c, g, or t
  modified_base (2378)..(2378): a, c, g, or t
  modified_base (2387)..(2387): a, c, g, or t
  modified_base (2391)..(2391): a, c, g, or t
  modified_base (2414)..(2414): a, c, g, or t
  modified_base (2425)..(2425): a, c, g, or t
  modified_base (2428)..(2428): a, c, g, or t
  modified_base (2432)..(2432): a, c, g, or t
  modified_base (2438)..(2438): a, c, g, or t
  modified_base (2442)..(2443): a, c, g, or t
  modified_base (2457)..(2457): a, c, g, or t
  modified_base (2459)..(2459): a, c, g, or t
  modified_base (2461)..(2467): a, c, g, or t
  modified_base (2469)..(2469): a, c, g, or t
  modified_base (2474)..(2477): a, c, g, or t
  modified_base (2480)..(2486): a, c, g, or t
tatttccatgcaagtggaagacggtaccgtctccccacatttgagaagactgttttgcatcactctttgctattgaaggaagcagtgatggtgaatttccttctgtttgggttccttgtgtctataacttcctttgtggtaaagccatcaggaagaatagtgggagtggggtatatggtcagggtgctcatatcctgctttagcctagctgcttcttacggagtgcaagggagaactctgagaagcagtatgtaaataccagggagctgattgctgaatattgtggtctcatctgaatattgtggtctcatctaaatattgacaccaggcaatgaagcagaaatagagtatgtgtccctttatgcgtgggtaacttaagcttctgtcatgtgggaagggggaccgaatcttccctgggaggaaggctccaaattctcactacttctgtgttacttgaagggggaagcataaggaacccagtttgaaggcaacattgtgtgccatgaatctgcttattaatcaacatgccttgttaatgtcctctgccctgaacagcccttactcagttctcatttggaaagttattttttggggttacatcctgtttgtttcagaatttaanncnnnnnnnggnggntnacntgangtcangagttnnagannagcctggccaacntngngaaacnccnnctctnctnaanatncaaaaattagccaggtgtggnnncanncgcctgtantcccagntacttgggaggccgaggcaggagaatcgcttgaacctgggaggcagaggtngtagcgagccaagatcacaccattgcactcnagcctgngncaacagagtgagactctgtcaaaatcaaaaaaaccaaaatacaaaaaactccatngttctgagagtttcccctaaattatcggaagacactcacattgaattggtaggacctantagtatagaggagaantggtatgtatgtcagcagtagagttccaatccaaantgcgctatcgcattagaaatacattaccctcccactccccaagttcagnaaattagaagagaatctgnagtttgtaggangggaatanagctgctataaacatttatgtgcaggtttttgtgtagactcgttttcagctcctttgggtaaataccaaggaaccaggttgctggattgtaagttaagagtatgtntagttttggaagaaactgccaaactgttccaacatgactattttgaattcccatngacaatgaataagagttcctgtagctcctcaccctcattagtatttggtgatgtcactcttgcattttagctaatgggtgaatagtggtctcatcgttttaattcccaatcccatagtgatgtggagcaccttttcatatacttaatctgccatccttatatcatcattggtgaggtgtctggattttctgtccagaattttagttctagtggttttcttatttttagaaaggaagtataggaaggaaggtttaatctgtcttaagcctgattatatgaaaatcaagaataggctaggtgtggtggctgacatctgtaatccccgcactttgtgaggctgaagtgggaggactgcttgagcctgggaagtcaagcctgcagtgagccatgactgttgctgcactccagcctgagtgacagagtgagaccctgtctcagaaaaaaaaaaagcaggctcattttaaagttgtttatattttattttttgaaggaaataaagttgaagagatacnaaagggtagtgaagatnctccttcccctcctgtaattcagnctgtntagtttctattctcgcacagccctgttatcagtttctagtgtaagctngcagtgacttttactttatttataagcaagtgttagtgggtgttgtcatttcttttaaaaatataaattatactgtacatgctattttgtattttggcttttctcccacctaaacaccctaaagatcattttctgtcagtatataaaatcttggtgatgccaatacccatcccttagattgtacaagcagcatttngccatgctttatcccatagcctgcctcctgcagtctcatctttttttctatatgcgtgtccaagtaagttgtagacatttttcacttttaatcctttcagcatacatgtcatgggaattngtnntnngtttntgnntntntngtgtttgagacagtcgctctgtcacccaggctggagttacagtgacgtgatcccagctcattacngnctccacctcccagtttcaagcaattctcatgcctcngattcccgagtagctgggattacagatgtgcaccannangcctgactaattttngtattttnagtagagatggggttncatcatgtnggcnaggctggtctggaactcctggcntccagtcattngcntgcntcggcntccnnaagtgctgggattncngnnnnnnncnaccannnncannnnnnnttggagtttttttgagggagatttgcagtaaggtgaataaatgttaagtgtatcatttgatgaggttttttctttttttttttttttttgagatggagtcttgtatcgcccaggctagagtgcagtggcctggtcttggctcactgcaacctccacctcctgggttcaagggagtctcctgcctcagcctcccgagtagctgggattacaggtgtgagccaccatacccagactcatttgatgagttttgatgtaaaagcatgtaactcaaacccctatgtctggaacatctgtattacatctgaattttttcacctagtcaattcctgcacctctctctcctgtcccttcttccctcccctggcagtcagctactgttaggattttgttcactgtagattaattttgcctattctagaacttcatataacggactcacttatgcagtatgtattctgtaagttccttttactcagcatgtttgtatgttcatcagtgtgtttaagctttgttcctttttatggctgagcagtgttctatgtatgaatgccacattttaacgtttcacctgttaggtgaacaactaactggtgaacaatgggctgtttctagtttggggctatcatgaataaagttggtatgaacatgt

SEQ ID NO: 211 - DNA, 1712 bp, Homo sapiens
  modified_base (557)..(557): a, c, g, or t
  modified_base (573)..(573): a, c, g, or t
  modified_base (581)..(581): a, c, g, or t
  modified_base (604)..(604): a, c, g, or t
  modified_base (623)..(623): a, c, g, or t
  modified_base (655)..(655): a, c, g, or t
  modified_base (865)..(865): a, c, g, or t
  modified_base (896)..(896): a, c, g, or t
  modified_base (904)..(904): a, c, g, or t
  modified_base (944)..(944): a, c, g, or t
  modified_base (1380)..(1380): a, c, g, or t
tttcctctccctttgcattaccttttattacctcatgccaggctggaatttgggaaatctgtttctattacaatgtatacattatacattaaataagattatgcacattacaaataaaattatttcaaaattaagaaattacacatagttcaattaaaattaaatttgaaaataattttatttgtgctgttctttagagcaccaacaattcatacacatgatcttcattctcatagccacttaaggtaagtattacctccattttagaggtgaagaaattaaggttcaaaataactaatttggtgatggccacatagtttttaagaacgttgagtctagcccaagagtgactggaattttcagttcacttaccaccattccagcagaatagcagagcaatttcaattttgcagtaaatcagggttaatcatcccagaactgtttgatagcaaaagactaaaacaactcaagtgcctaccaacagtggacaggttacataaaatataatgcatttgcataatgcagtacatgcaactgtgtacaggaagctctgtatngttctcatagggaaangttctccnaagatagattgttatgaaaaggncaagtgcagaaaagtctancacagtctgctacctgacaagaatgaaaaaangtgaagaaaacacgtatcattcattattgactgatatcagcaggaatgaatactgggcagatacacaagaaaaagaaaagtgaccacctgggtaagttgagggatggattctttatatataatctctttacttcaaatagtttgaaccctgtgaatgtaatacttatttaaaaaattaaacacattttgtattcagaagaacttcccctncaataatattctttctcttcattttatcctnccttatcntccccacacatgatgtagaatgtttttaataaaacaattngcggatgcagaatcaatcagtaatgtaggaatcagtaatgccatccatccacttattccttagaattggtaagtttggcaggcacttaggatcctggcatctctctgaaatgagaagcttttgcaacctcagcctccccaagtgctgggattacagatgtgagacaccagatcagcctcagaagacattttcttagtgccttttttccttctacctacaagcagtgaggttagctcttcctttgaaacggtaggggggctctgaaaagagcctttgggtttgatagcgtttccgggagctcagatacctgtcaaatcacttgcccttggccttgtggtgactctcggtcttcttaggcagaagcacggcctggatgttaggaaggacgccgccctgagcaatggtcacccggcctagcagtttgttgagctcctcngtcgttgcggatggccagctgcaagtggcgcgggatgatgcgagtcttcttgttgtcgcgagccgcgttgccggccagctccaggatctcggcggtcaggtactctaacaccgccgccaggtacaccggcgcgcctgccccaacccgctctgcgtagttgcctttacggagcaggcggtgcactcggcccaccgggaactggagaccagcgcgagaagagcgggatttcgctttggcgcgagctttgcctccttgcttaccacgtccagacattgcaatcagacaaaaatcaccaaaaccagcagcctaagctcacgagaaaacaaacaaaa

SEQ ID NO: 212 - DNA, 2192 bp, Homo sapiens
  modified_base (666)..(666): a, c, g, or t
  modified_base (691)..(691): a, c, g, or t
  modified_base (711)..(711): a, c, g, or t
  modified_base (713)..(713): a, c, g, or t
  modified_base (720)..(720): a, c, g, or t
  modified_base (726)..(726): a, c, g, or t
  modified_base (736)..(738): a, c, g, or t
  modified_base (740)..(740): a, c, g, or t
  modified_base (1057)..(1057): a, c, g, or t
  modified_base (1061)..(1061): a, c, g, or t
  modified_base (1063)..(1076): a, c, g, or t
  modified_base (1225)..(1225): a, c, g, or t
  modified_base (1229)..(1229): a, c, g, or t
  modified_base (1234)..(1234): a, c, g, or t
  modified_base (1241)..(1241): a, c, g, or t
  modified_base (1264)..(1264): a, c, g, or t
  modified_base (1267)..(1267): a, c, g, or t
  modified_base (1269)..(1272): a, c, g, or t
  modified_base (1279)..(1279): a, c, g, or t
  modified_base (1284)..(1285): a, c, g, or t
  modified_base (1287)..(1289): a, c, g, or t
  modified_base (1291)..(1291): a, c, g, or t
  modified_base (1296)..(1296): a, c, g, or t
  modified_base (1299)..(1300): a, c, g, or t
  modified_base (1307)..(1307): a, c, g, or t
  modified_base (1310)..(1310): a, c, g, or t
  modified_base (1319)..(1319): a, c, g, or t
  modified_base (1323)..(1325): a, c, g, or t
  modified_base (1615)..(1615): a, c, g, or t
  modified_base (1618)..(1618): a, c, g, or t
  modified_base (1623)..(1623): a, c, g, or t
  modified_base (1627)..(1627): a, c, g, or t
  modified_base (1631)..(1631): a, c, g, or t
  modified_base (1637)..(1637): a, c, g, or t
  modified_base (1643)..(1643): a, c, g, or t
  modified_base (1648)..(1648): a, c, g, or t
  modified_base (1657)..(1657): a, c, g, or t
  modified_base (1660)..(1660): a, c, g, or t
  modified_base (1667)..(1667): a, c, g, or t
tttcagaatactgtataaaattaaatagaatattgtaatagtttaaggttttgcatatattgggttaaatatttctgaaaagcaaaattatttcaagttttcaaatatcttgacatggaacactgcctttgctaggagtcatttctagaaattacttaaaataggagacaagcatcaatcatagggatttcagctttagaactattggaacaaatctaggttagacaaccagcttatattattaagcaagattacatataataatcatctttttttaaaggagagacttttgcaaatattatacagcaatcaaaaggtcttagcttagtgtatcatccttattagaaaccaagatgttgcattttatttcagtgctttctgtagtcatagctaactcttttacctcagcaatttcaatcaaaaagcttctctatcattctatacataaaatgcagacacattagcagtcaacattatgaatgcctttacaggtaaacaaacaaaatcactttattactggattttataaccaattcccattcttttttgtgactattcaggagaatactgggttgaccctaaccaaggatgcaaattggatgctatcaaggtattctgtaatatggaaactggggaaacatgcataagtgccaatcctttgaatgntccacggaaacactggtggacagantctagtgctgagaagaaacncngtttggnttgganagtccatggnnngnggttttcaggtaggaaaggatatacctttttttaaataagtcacctctatatcctttgtattcttcctatatgttcatcacaaagcaaagttactaggttggtacaaacataattgcagtttttgctactgaaagtgatggcatgcaataaaaatattttcacacataaaatactcgtacataaaatatataaacagcccatattacaatatgcatacacatactacatgaatccctcgcgtgcagttacaactgaaatgtttgatctgttttatttgttccctattacagtttagctacggcaatcctgaacttcntgangnnnnnnnnnnnnnncagctggcattccttcgacttctctccagccgagcttcccagaacatcacatatcactgcaaaaatagcattgcatacatggatcaggccagtggaaatgtaaagaaggccctgaagctgatggggtcaaatgaaggtgaattcaaggntganggaantagcaanttcacctacacagttctggaggntgntnnnntgcacgntaggnnannntnttctncannataggtnatnaagcagtcngcannntagtttaatcatgcaaattattttgaatagaataaataaaattaataggatgaaataaagatagcatttggtatgaattacatacattgcatctactgattcattgcagggaatgttaaatgcaacaaaatggatcttagcctccagatgaaaaccagttgaaataaaagcatttaaaatttaaatccataatgcaaactttatcagataattgggatagttactatatgttttgaataatacctgtcacattaactcagtttgaaatatctgttttttaaaattttaanggntaacnttcnaatnctctcnatttgnttatngttatttgngancaaaggnaaaactcacttctaatattagcgaatttcattgtgagagacctatcctctttttaataaaccatttataaacctgttagcaatggccggaaccaggcctcctgaggatgcactggtctatagcaattgccctgctgcatttactaagaatccttacaaggcatttgtttaagaatattgtttatcaactaagaagattacagctttgaagtagagcaggtctcatatacatgaataataacatggcacgatgaatgcttctttagagtaaaaaggttttctttaacttgttaagtcagagttgtctaagtaattgtaatgtcatgatcatgtacattttgtccttttttacagaaacacactggggaatggagcaaaacagtctttgaatatcgaacacgcaaggctgtgagactacctattgtagatattgcaccctatgacattggtggtcctgatcaagaatttggtgtggacgttggccctgtttgctttttataaaccaaactctatctgaaatcccaac

SEQ ID NO: 213 - DNA, 1197 bp, Homo sapiens
  modified_base (954)..(954): a, c, g, or t
  modified_base (1002)..(1004): a, c, g, or t
  modified_base (1026)..(1029): a, c, g, or t
ctgaagtatttttagttatataagattggaactaccaagcatgtggctcctggtcagtgtaattctaatctcacggatatcctctgttgggggagaagcaacattttgtgattttccaaaaataaaccatggaattctatatgatgaagaaaaatataagccattttcccaggttcctacaggggaagttttctaatactcctgtgaatataattttgtgtctccttcaaaatcattttggactcgcataaactgcacagaagaaggatggtcaccaacaccaaagtgtctcagactgtgtttctttccttttgtggaaaatggtcattctgaatcttcaggacaaacacatctggaaggtgatactgtgcaaattatttgcaacacaggatacagacttcaaaacaatgagaacaacatttcatgtgtagaacggggctggtccacccctcccaaatgcaggtccactgacacttcctgtgtgaatccgcccacagtacaaaatgctcatatactgtcgagacagatgagtaaatatccatctggtgagagagtacgttatgaatgtaggagcccttatgaaatgtttggggatgaagaagtgatgtgtttaaatggaaactggacagaaccacctcaatgcaaagattctacgggaaaatgtgggccccctccacctattgacaatggggacattacttcattcccgttgtcagtatatgctccagcttcatcagttgagtaccaatgccagaacttgtatcaacttgagggtaacaagcgaataacatgtagaaatggacaatggtcagaaccaccaaaatgcttacatccgtgtgtaatatcccgagaaattatggaaaattataacatagcattaaggtggacagccaaacagaagctttatttgagaacaggtgaatcagctgaatttgtgtgtaaacggggatatcngtctttcatcacgttctcacacattgcgaacaacatgttgggatgggnnnctggagtatccaacttgtgcannnngatagaatcaatcataaaatgcacacctttattcagaactttagtattaaatcagttcttaatttcatttttaagtattgttttactcctttttattcatacgtaaaattttggattaatttgtgaaaatgtaattataagctgagaccggtggctctcttcttaaaa

SEQ ID NO: 214 - DNA, 7028 bp, Homo sapiens
ccggacatgaagcgctacctgtgggagcgctacccgggaggcgaagagaagcacagaagaattggttccttccattatgagcaacttgttgaatccagatgccattttctcaaacaatgaaatgagcctgtcagacattgaaatctatggcttcgattatgattacaccttggtgttttattcaaagcacctccacacgctgatatttaatgctgcacgggaccttctcatcaatgaacaccggtatccagcagaaatcaggaagtatgagtatgacccaaattttgcaattcgtggacttcattatgatgtacagcgggcagtattaatgaagatcgatgcttttcattatatccagctgggaactgtctacagaggcctcagtgttgtccctgatgaagaagtcattgaaatgtacgaggggtcccacgtgcccttggagcagatgagtgacttttacggaaagagctctcatggaaacacgatgaagcagttcatggacatcttctccctgcccgagatgaccctcctgtcctgcgtgaatgaatacttcctcaagaacaacatcgactatgagcctgtgcatctgtacaaagatgtcaaggattcaattcgagacgtccacatcaaaggaataatgtacagagcaattgaagcagacattgaaaagtacatctgctatgctgagcagacccgcgcagtgttggccaaactggctgatcatggcaagaagatgtttctcatcaccaatagccccagtagctttgtggacaaagggatgagttatatcgttgggaaagactggagggacctgttcgatgtggtcattgttcaggctgagaagccaaacttctttaatgataagcggaggcctttccgaaagatgaatgagaaaggtgtcttactctgggataaaatccataagttgcagaaaggccagatatacaagcagggtaatttatatgaatttttgaagcttactggatggagaggatccagagtgttgtattttggtgaccatatatacagtgacctggcggatttgaccctaaagcatggctggaggactggtgcaatcatcccagagttgagatctgagctcaaaatcatgaacacggagcaatacattcaaaccatgacctggctgcagaccttgactggcttattggaacagatgcaggttcacagagatgctgagtcacagctggttttgcaggagtggaaaaaggaaaggaaggagatgcgagaaatgaccaagagtttcttcaatgcccagtttggaagcctgttccgcacagaccagaacccaacctacttcctaaggcgcctgtcgcgcttcgctgacatctacatggcgtctctgagctgcctcctgaactatgacgtcagccacactttctacccccggaggactccactgcagcacgaactgcccgcctggtcagaaaggccccccaccttcggaacccctctcctgcaggaggcccaggccaagtagccaagggcaaaaactagaaactgtaactgcccctgattgggcaggcatgatggggttgacttcatgtgggtctgagtgttgcttttggaaaagatacagataagccttttgatatttattttgtaccttacggagaataattctcccaatgattaagacaggagctagcagcccacccctccagcctttccccccatgcagggctgaaaggcaagcttcacattggaactctgattttgcctttttgtttactgaggtcctggaacatcaggtttcctgggataggtagaccacttgatgccatgtctgtattctagcaggtcaagcttgaaaccgttcttgactcctccatggaacatttcctgaacatttacgggctatgcattgggaactgcaggggcacagtgatgggcaaagattagctgcttccagaaggctgatttcgtgggctccacaatggtaaaacgctgctgtgagtggcagagaggttccccaggtgatggccagttcccaaatcatttggtactaaggctttgacattctggcacatcacatcaaatagaacacagcctccctggaaggacttaagtgagaaagaacaagagaagctgcaactcctggacccttttgtcctcagtgtgtggttcctgcgtccttccccagggcaggagagaggagatgagagctctggtcaaaacctgccagctagtggaacagccttctatagagccttctgcaagaaacgagtgggtttgaagaaccaaaacatttgtggtaggtctcccaggagcttgttaaacctggaaacaccacctgagttggtttcatctgctcattggaagaaagaaaatgaaccaggaaaaagcatctttgtcatgaaatgctatgccatgccacccacccagttgaattggaatcctgttaaaacatgagatttaccagaaacagtcctttgtctagatggaaacaaacaagatcctggcttctctctaatgagttaccaactgagaggtgcttggattggccaggggaggaggaagatggccaccacaacttagccatgtccagccttctcttagatttcactcctgtgatgtttgtgcgactatttgggagtttgtatagtttgtttttttttttttgttttgttttgtttttttttagatgtctaagatgggaaagggcgaaggacattgaagctaaggaatagatatgacctagctaaccaagcttttctcatttctttctgttttgttttgttgagatggagttttgctcttattgcccaggctggagtgcagtggcacaatctcagctcactgcaacctctgcctcccgggttcaagcgattctcctgcctcagcctcccaagtagctgggattacaggcatgcactaccacacccagctaattttgtatttctagtagagatggggtttctccatggtggtcaggctggtctcgaactcctgacctcagataatctgcccgccttggcctcccaaattgctgggattacaggtgtgagccaccgcacctggcctgcttttttcatttctttctaggggcaatgcaagtggcatgtattccttttgttggagggaagaatccttaattgcacctggatttgtagtatccttcaatgtaaagtgcatatttactgcactctctgagtgctatgggaatgtctgctgttattagttatggggctgctaatactgttttaattgcatatgctatatcaatacttctgttcagattagcctgatctagtattgctaaaactcattttaagcttttgcggtaacttgtatatattcttaaatctaaaggatggcaggaacatgaggggagcttgtggagagtgcttgcttattcaacatttttattgtgataaatgtatgtaaccatctattgatgaaatccaagtctggcattccatgggctccttgccagatggcagaaacttaatgagttatatagcatcctttgtaatgctgcttgttatagttggaatgtacttgtgatatttggctgtatttaactataatggtgaaggtgaccctttagatccaataaggcttctccccatcttttcttctacattttgttatgaacacagtaaggcacagtagtatgttctttttttggaacagggtaggcattttgtttattgtttgcttgcttctaggtgttttcgccatcagggtgtattggaggctgacacttaatgggtgtgtgttacgcccagaactgctcggtgtcggggttctaaaagaatgcgctggtgttcttggcttcaagtttctgctttggagaagcagattcaggaagtaggtgttgcttaaaaataattcttggtttttatctaatcagatattcattgattacctaccaggtgccagttatagggtgttttgtttactcaagaatgaagtagaactatttttaaaacctgtttccatgagtgttcacgttaggtgacctaagctttgaaggagaaaaacattttctgggtatgaataatgagttttgtaatcaattcccagttagaagaatttcagtctctgggccattgagcttggcagtgttgagatctcccatgtgacagaagcctggcatctgggccaccaaggctcactgactgtgtaccttgcagactgtagacccatgtcgtggcggtaacggggccaaacacagtcattcccatgtgaacgatggaggcacatcccactttattattaatccttgtatatactcagtcaggacagattttaacttgtcgctgtcatgactttttttttttttttttgaggcaaggtctcgctctgttgcccattctggagtgcagtggtgtgatctcggctcactgcaacctcttgcctcccaggttcaagcaattttcgtgcctcagcctcccgagtagctgggactactggtacatgccaccaggcctggccaagttttgtagttttaatagagatggggtttcaccatgttggccaggctggtctcaaactcctagcctcaagtgttctgcccacctcagccttccaaagtgctgggattctgggtgtgagccactgtcatgcctggcctcgtcatgactcttttctctttttttttttttttttttttgagatttagttttgctctttttgcccaggccggagtgcaatggcacgatcttggctcactccaacctccgcctcctgggttcaagtgattctcctgcctcagcctcccgagtagctgggattacaggtgcccaccaccacatccagctaatttttttgtatttttagtagagacggggtttcaccatgttggccaggctggtctcgaactcctgaccttgggtaatccacctgccttggcctcccaaggtgctgggattacaggcatgagccaccgtgcccagcctatcatgactcaactgggatctggcacactgcactgggtgttttgttctctgatgtgcacattgatgaatgcatattggtacaagggaaacgaatctgttttcagccatttaaaaaattgtgttgtaaagcaaacaaaaatagcttgaacatttaaaaattactgtttaatattgtttgactgattttctaagaattatgtgaacaatgatgagtccagggcagcagccatcacaaatatgacagtccagcaaggcccatggaggtccctttggaagggacttgcacagctgattttctttttccagtgttgtttttacgggtgaaacgtggcttttgaaatactttagttgtttggcttagagctcccactttccccctaacatagtgcctgtctgttttttaaaacattttacccttcggcactattttctgctattcccattaatattatgtaacataaaccacttgctactgatttgggcatattacagactacaattactagttgctttgaatgcattggcactcttaattattgcaaaggagaattgaaaagtagtcttgtggtcctagttaatttagctttgggcaaactaagtggcttttcttctgtcctcttctcaaaaggccttttaagcagcagagactgggctaaatactggaactgaattccacttttctgcctgctcatttgctgccaaagaccacttggggctccttgtctagaatgctctaagacgaaatttggccagacacagggttccttgattgttctgttcaactaatagagaacctacattttgccttcttaatatcgactttcttttgtaccaggtttttctttctttcttttttgccttaggagcttagctcaaagttcagctaacctttgacactactagtgtcatttagtaacagtaatctttgacactactagtgtcatttaggagcttagctcaaagttcagctaacctttgacactgctagtgcgttcaagaaagggtagggaatgaagtacccttaatgcagggtcagcaaacttttcctgtaaaaggccagataggaagtatttttggctttttgggctgtttgcttttgctactactactgtgggaatgaccatggtcatggctgtgttccagcacaacttgatttaccaagacaagctgtgggctgtatttggtcctcaggctgtggcttgctagcccctgctctaatggattgtgttggcggcaatggcaagattcccttgctgagaacatgcagatgaataaccttatagctgggatgcagagaggagaaagttctgtaggtaataagtgcactgtattccctctgagctacttcctgggcatagttacatgtatggccagtgtgtgtacttgagccatcaggctcagacacttgttgaatatacctctcattgcattagtttgtaattgtgctagtgctgggtgctgagctcagctgcccggatgacctttccagactgaaggacatactcccctaacagctgggagtgctgctggctggccatttacttccagcccttatgaggagtttcccctgctgaagagccctgcctgccccagatcatacccccttcctgcctgtaacccttaccggctccatatggggtacaaaggtctggcctcctcaccccaacttgggaaaccctctggggccatcccagctccagagccccttgtggggtcagtgagacctcattgtggccacattacagcccagtgcctctccctgacaagcctgtacccagccggctcagcccacagcactgtcctatgaaccttcctgcacgccattctccacctcagtatctgctttcggggaacccaacctgcgacagtgcttctgtgtgttttcagtcctgcaggtttgaactctgactttggagacttttccagttatctcgtggaatgacagattgtgcctgtatgatatcaggcacaattaatgcaaattaggcagacctatttattctagatgtgaatttgctatttattttaaatgttgattttatgtgttatgtgactctgaacttattgccaaataaaagtttgaattgtaaaaaaaaaaaaaaaaaa

SEQ ID NO: 215 - DNA, 2764 bp, Homo sapiens
agacgcgcaagggcgccgatggaggcagactcgccagcgggccccggcgccccagagcccctcgcggagggagcggcggccgagttctccagcctgctgcgcaggataaaaggcaaactcttcacctggaatattttgaaaacaattgccctgggtcagacgttgtccttgtgtatatgtgggacagccatcaccagccagtatttggcagaaagatacaaagtgaacacccccatgcttcagagctttatcaattattgcttgctgttcctaatttatacagtgatgctggcatttcgatcaggcagtgataaccttttagtaatcttgaaaagaaaatggtggaagtacatcctgctgggactagcagatgtggaagctaattatgtgatcgtcagagcctaccagtacacaactctaaccagtgtccagcttttggattgctttgggattcctgtgttgatggctctgtcatggtttattcttcatgcaagatacagagtgatccacttcatcgccgtggctgtctgtctgttgggtgtaggaaccatggttggtgcagacatactagcagggagggaagacaattcagggagtgatgtattgattggtgacatcttggtccttcttggggcttccctctatgccatttcaaatgtttgtgaggaatacatcgtgaagaagctgagcagacaggagtttttaggaatggtgggcctgtttggaacaattatcagtggtatacagctattgattgtggaatataaggatattgccagcattcattgggactggaaaattgccctgctgttcgtggcatttgccctgtgtatgttttgcctgtacagcttcatgccattggtgattaaagtcactagtgccacttccgtcaacctgggcatcctgacagcggacctctacagcctttttgttggactctttctgtttggctataagttttcaggactctacatcctgtccttcactgtcatcatggtggggtttatcctgtactgctccacccctactcgcacggccgagccggctgaaagcagcgtgcctccagtcaccagcattgggattgacaacctggggctgaagctggaggagaacctccaggagacccactctgctgtcttgtagctggagaagatggcgcacccatcccccaccaggataaagcagagcctgctgcctgctgaggggacacttggggaaatagcagactcagaatggacactctacaaccctgggttggatccagtggttaggttttagaaaggaacactgaacaaagttcaaaagtagaaataccaaaatagagcagaaaccaagctaagagtgtgtttctgtgtttgaggaccaatatctgttcgtgttgaggagatgaggtgcagactccacactggggtcttagaggcaccggtgggaaagcaggactggggagagatccaggactgagccagcctcaggccagggcgggaaagcaggctgtccaggctgggcttggtggtcaggaacaggggcagctcacggtggctctggagtacgtttcctctgtcagatgcttcaaggtttttttttttttttttttttgctgaggcagttattgtccacaggcctttgggtacagatgaggcctcggggctgactgcatgtggcagaaaacgggtgggtcagcccttgaaaagtcttgagatataagtgtgagtactatacaagcattaaactggagtgcagtaaacctaggaaccttcccacaattgtttttttgtttgtttgagatgcagagtctagagtgcagtggtgcaagctcagcttactgtaacctctgcctcctggattcaagtgttagtagctgggattacaaaagcatgtggccccacgcccagctaagttttgtatttttagtagacatggggtttcaccatgttgcccaggctggtcttgacctcccgacctcaagtgatctgcctgccccgacctcccaaagtgctgggattacaggcttgagccaccgtgccaggcctgttttgtttgtttttgtagagagatggggtttcgccatgttgcccaggctaatctcaaattcctgagctaaagcgatctgcccacctcggcctccgaaagtgctaggattacagatgtgaaccactgtgcctggcctgtttgtttgtttgtttaaaacatttctccatcactcattccaggtcccagagcaaactctctctgctctcggagcctgtgacactggctatgtgctccacagtttcagtcccaggtcatactctccaacagttttcagagctccatatatatgtagatgccatcctttctaaaaacttctcacgacctcctggaatattcctattgatctcattttatttagcatcagctcaagaaactaagtcttagtgcacagtatcacaacaaagaaaaagctttgtttttataactggtaaaaacaagaaaagattctcatcaaaatgaaaatataaaattaatcatttctcaccaaagagtatgcctgggagcctccagctgttaaaagacaatgctattactacttcttatcaaaaatctgtaatgccctgtgatttttatgatacttcttcaatacaaagtgttaatatgtgtcatcagtataataacaaccaacaaaatgccactttcagaaaactgtatgtaaattttttgtaacaatgtaaaaaagaaatggggagtaagtgttcacatcattaaaaggctttgaattcatggaaat

SEQ ID NO: 216 - DNA, 2279 bp, Homo sapiens
gctgacggggtggcagtgcggcgggttacggcctggtcagaccataatgacttcagcaaataaagcaatcgaattacaactacaagtgaaacaaaatgcagaagaattacaagactttatgcgggatttagaaaactgggaaaaagacattaaacaaaaggatatggaactaagaagacagaatggtgttcctgaagagaatttacctcctattcgaaatgggaattttaggaaaaagaagaaaggcaaagctaaagagtcttccaaaaaaaccagagaggaaaacacaaaaaacaggataaaatcttatgattatgaggcatgggcaaaacttgatgtggaccgtatccttgatgagcttgacaaagacgatagtacccatgagtctctgtctcaagaatcagagtcggaagaagatgggattcatgtagattcacaaaaggctcttgttttaaaagaaaagggcaataaatacttcaaacaaggaaaatatgatgaagcaattgactgctacacaaaaggcatggatgccgatccatataatcccgtgttgccaacgaacagagcgtcagcatattttagactgaaaaaatttgctgttgctgagtctgattgtaatttagcagttgccttgaatagaagttatacaaaggcttattccagacgaggtgctgctcgatttgctttgcaaaaattagaagaggccaaaaaagattatgaaagagtattagaactagaaccaaataactttgaagcaacaaatgaactcaggaaaatcagtcaggctttagcatccaaagaaaactcatatccaaaggaagctgacatagtgattaagtcaacagaaggagagcgaaagcaaattgaagcacaacagaataagcagcaggccatttcagagaaagatcgggggaatggatttttcaaagaggggaaatatgaaagagcaattgaatgctatactcgagggatagcagcagatggtgctaatgcccttcttccagctaacagagctatggcctatctgaagattcagaaatatgaagaagctgaaaaagactgcacacaagccattttattagatggctcatattctaaagcttttgccagaagaggaactgcaagaacatttttgggaaagctaaatgaggcaaaacaagattttgaaactgttttacttctggaacctggaaataagcaagcagtaactgaactctccaaaattaaaaaggaattaattgagaaaggacactgggatgatgtctttcttgattccacacaaagacaaaatgtggtaaaacccattgataatccaccgcatcctggatcaactaaaccactcaagaaggttattattgaagaaactggtaatttgatacagactattgatgtgccagatagcactactgctgctgctccagagaataatcctattaatctagcaaatgtaatagcagccacaggcaccacaagtaagaagaattcaagccaagatgtcctttttcccacaagtgatactccaagagcaaaagtattgaaaatagaagaagtcagtgatacttcatccctgcaacctcaagccagtttgaagcaggatgtatgtcagtcttacagcgagaaaatgcccatagagatagaacaaaaacctgctcagtttgccacaactgttcttcctccaattcctgcaaactcgttccagctcgaatctgatttcagacaattgaaaagttctccagatatgttgtatcagtatttaaagcaaattgaaccatctttgtatcctaagttgtttcagaaaaatctggatccagatgtattcaaccagatcgttaaaattctgcatgacttttacattgagaaagaaaagccattactcatctttgaaatcttacaaagactttctgaactaaaaaggtttgatatggcagtgatgtttatgtcagaaacagagaaaaagattgcacgtgcattatttaatcacatagacaagtcaggattgaaggatagttctgtcgaagaactcaagaaaagatacggtggttgatttccatttttgctgaaataattgtttttgactttcatatgtaaattttttctactgaaagtgttttgctttttaagaaaatgaaattatatagcaggaaaggactatctttgaacataagttaattaactataaggtgaattgtgatttaactagtgagaattgtattcaagtgaactctgtttttctgaaaataaaaatataaacaatgagaaaaaaaaaaaaaaaaaaaaaa

SEQ ID NO: 217 - DNA, 3998 bp, Homo sapiens
ccgggagcccgggcgccctggagtgaggaggaccgggagctggctctggaggctgcggaggcgacgccggagagaacgaagcctcggctgggagcggatctttcgaagatggtttggctgccttggagatttggagatctgatgccacgatgaggactcacacacggggggctcccagtgtgtttttcatatatttgctttgctttgtgtcagcctacatcaccgacgagaacccagaagttatgattcccttcaccaatgccaactacgacagccatcccatgctgtacttctccagggcagaagtggcggagctgcagctcagggctgccagctcgcacgagcacattgcagcccgcctcacggaggctgtgcacacgatgctgtccagccccttggaatacctccctccctgggatcccaaggactacagtgcccgctggaatgaaatttttggaaacaacttgggtgccttggcaatgttctgtgtgctgtatcctgagaacattgaagcccgagacatggccaaagactacatggagaggatggcagcgcagcctagttggttggtgaaagatgctccttgggatgaggtcccgcttgctcactccctggttggttttgccactgcttatgacttcttgtacaactacctgagcaagacacaacaggagaagtttcttgaagtgattgccaatgcctcagggtatatgtatgaaacttcatacaggagaggatggggatttcaatacctgcacaatcatcagcccaccaactgtatggctttgctcacgggaagcctagtcctgatgaatcaaggatatcttcaagaagcctacttatggaccaaacaagttctgaccatcatggagaaatctctggtcttgctcagggaggtgacggatggctccctctatgaaggagttgcgtatggcagctacaccactagatcactcttccaatacatgtttctcgtccagaggcacttcaacatcaaccactttggccatccgtggcttaaacaacactttgcatttatgtatagaaccatcctgccagggtttcaaaggactgtggctattgcggactcaaattacaactggttttatggtccagaaagccaattagtgttccttgataaatttgtcatgcgtaatggcagtggtaactggctagctgaccaaatcagaaggaaccgtgtggtggaaggtccaggaacaccatccaaagggcagcgctggtgcactctgcacacagaatttctctggtatgatggcagcttgaaatcggttcctcctccagactttggcacccctacactgcattattttgaagactggggtgtcgtgacttatggaagtgcactacctgcagaaatcaatagatctttcctttccttcaagtctggaaaactggggggacgtgcaatatatgacattgtccacagaaacaaatacaaagattggatcaaaggatggagaaattttaatgcagggcatgaacatcctgatcaaaactcatttacttttgctcccaatggtgtgcctttcattactgaggctctgtacgggccaaagtacaccttcttcaacaatgttttgatgttttccccagctgtgtcaaagagctgcttttctccctgggtgggtcaggtcacagaagactgctcatcaaaatggtctaaatacaagcatgacctggcagctagttgtcaggggagggtggttgcagcagaggagaaaaatggggtggttttcatccgaggagaaggtgtgggagcttataacccccagctcaacctgaagaatgttcagaggaatctcatcctcctacatccacagctgcttctccttgtagaccaaatacacctgggagaggagagtcccttggagacagcagcgagcttcttccataatgtggatgttccttttgaggagactgtggtagatggtgtccatggggctttcatcaggcagagagatggtctctataaaatgtactggatggacgatactggctacagcgagaaagcaacctttgcctcagtgacatatcctcggggctatccctacaacgggacaaactatgtgaatgtcaccatgcacctccgaagtcccatcaccagggcagcttacctcttcatagggccatctatagatgttcagagcttcactgtccacggagactctcagcaactggatgtgttcatagccaccagcaaacatgcctacgccacatacctgtggacaggtgaggccacaggacagtctgcctttgcacaggtcattgctgatcgtcacaaaattctgtttgaccggaattcagccatcaagagcagcattgtccctgaggtgaaggactatgctgctattgtggaacagaacttgcagcattttaaaccagtgtttcagctgctggagaagcagatactgtcccgagtccggaacacagctagctttaggaagactgctgaacgcctgctgagattttcagataagagacagactgaggaggccattgacaggatttttgccatatcacagcaacagcagcagcaaagcaagtcaaagaaaaaccgaagggcaggcaaacgctataaatttgtggatgctgtccctgatatttttgcacagattgaagtcaatgagaaaaagattagacagaaagctcagattttggcacagaaagaactacccatagatgaagatgaagaaatgaaagaccttttagattttgcagatgtaacatacgagaaacataaaaatgggggcttgattaaaggccggtttggacaggcacggatggtgacaactacacacagcagggccccatcactgtctgcttcctataccaggttgttcctgattctgaacattgctattttctttgtcatgttggcaatgcaactgacttatttccagagggcccagagcctacatggccaaagatgtctttatgcagttcttctcatagatagctgtattttattatggttgtactcttcttgttcccaatcacagtgttagcactgaagctataaattacctggtcattttgtgatcacaagagtctatgcaaaaaaaaaaatttctttaccccagattatcagatttttttccctcagattcattttaacaaattaagggaagatattttgacacaagaaagcaggaacgtggagaaattggagcaggaaaagaaattatcaaagcaatagaaatagcttggtggtcctatggtgtttttggaagtatttggcattgctaattgagcagtccatatagtactacttttagaagaaacaaaaagtctattttttaaagtaatgttttttcttatgagaaaaaggtttagatagaattgggttttattaatattaatttaatgctattagcaatttccatatactatattgtggaaaagactgaagaatacaattctgagaaatataaaaaaattttaatggtatactcatgttgaaagataaatgttgctaagtcctggtatgatggtgtgagcttccttggggaagtacttcttgagttatgtaactaacaggatgttttactacagatctggatggctattcagataacatggcaaaaaatgatagcagaagatcattaaaaacttaaaatatattttattagaaaacatttatctatgaatgaatatttccttgatgctggtctctgcacacatatgcttggttacttgcatgcattcattggttgttcaataagtgagatgattacagataatactgtattttccttatatggaaaaccgttatagacccaataacaactaaacctttcaaaagaaaatattttctattatgaatgttgattttcataccaaagaagatggagagtctaaaatttggatatgattcttatgtttttttaatagaaaaccttcttcaagtttattttcctaaataaacatcataattgtgaaaaaaaaaaaaaaaaaaaaaaaaaaaaaaaaaaaaaaaa

SEQ ID NO: 218 - DNA, 599 bp, Homo sapiens
cgggacgcggatgcagacgcaggcggaggcgctgacggcggggatggccggggtggccacagctgccgcgggggcgtggacacagccgcagctccggccggtggagctcccccagcgcacgcgccaggtccgggcagagacgccgcgtctgccgcagggggtcacgaatgcggccgcacatattcaccctcagcgtgcctttcccgacccccttggaggcggaaatcgcccatgggtccctggcaccagatgccgagccccaccaaagggtggttgggaaggatctcacagtgagtggcaggatcctggtcgtccgctggaaagctgaagactgtcgcctgctccgaatttccgtcatcaactttcttgaccagctttccctggtggtgcggaccatgcagcgctttgggccccccgtttcccgctaagcctggcctgggcaaatggagcgaggtcccactttgcgtctccttgtaggcagtgcgtccatccttccctagggcaggaattcccacagttgctactttcctgggagggcctcatgttttatctggttcttaaatgtttgttactacagaaaataaaactgaggtattatt

SEQ ID NO: 219 - DNA, 2514 bp, Homo sapiens
  modified_base (314)..(314): a, c, g, or t
  modified_base (686)..(686): a, c, g, or t
  modified_base (987)..(987): a, c, g, or t
  modified_base (1173)..(1173): a, c, g, or t
  modified_base (1350)..(1350): a, c, g, or t
  modified_base (1866)..(1866): a, c, g, or t
catacattattttgtatatactgtatatgatgacttcagtgagcagtgaccattgtcgaggtgctcgggaaaaaccacagatttcagcagcacaatcaacgcaaccacagaaacaagtggtacaggcaacagctgaacagatgcgtctcgctcaagtgatctttgataagaatgattcagattttgaagctaaagttaagcagcttatggaagtgacagggaaaaatcaggatgaatgcatagtggccctacatgattgtaatggagatgtgaacaaagctatcaatatattgctggaagggaattcatacacnacttcatgggagactgtagggtgtaagaaaaagaattttgcaaaagaaaattcagaaaacaaagagaatagagagaagaggacggctgctgctgaactgtccagcagccctctctctcagctcagcagctccctctctggccaccagaacagcatgacctctgcacatgcgacacgttccacaagcacgccacacactcatgccagcgtggagagcaccgcatcctccgccgccttctcagcagcggcgacctctgctccaagtgccccgtcctcaggggttgtcctgcctgggagcatgagcactgtgagcagcctgtgcctgggggggaccactgtgagcgtccctagcagcagcaccagggccacggcnttggtgacctcaggcaaagcacccccaaacctgcctcaaggggtgcctcccctgctacacaatcagtacctcgtgggccctggaggactgcttcctgcttacccgatttacggttatgatgagctccagatgctgcagtcacggctgccaatggattactatggaattccctttgcagcacccacagcccttgccagccgagatgggaatctagctaataatccatattcaggtgacgtcacaaagtttggccgaggagactctgcatcccctgcacctccaacgaccaccagctcaggcncagcagagccagtctcaggcacagcacacagcccagcagcccttcgtgaatcctgcactgccacctggtatagctacactggtcttccctactacacaggcatgcccagtgccttccagtatggccccaccatgtttgtccctccagcctcagccaagcgacatggggtgaacctcagcactcccncacctcccttccagcaggccagtggttatggccagcacggctacagtacaggttatgacgacctgacccaggggacagcagcaggagactactccaaaggtggctatgctggatcatcgcaggcaccaaacaagtctgcaggttctgggcctggcaaaggagtatcagtgtcttcangcaccactggtctacctgatatgactggttctgtctacaataagacacagacttttgacaagcagggatttcatgcagggacgcctccacctttcagcctgccctcggtcttgggctccactgggcccctggctcagggagcggcccctggctatgcacccccaccattcctacacatcttgccagcccaccagcagccccactcacagctgctgcaccaccaccttccgcaggatgcacagagtggctcgggtcagcgcagcagcccagctccctgcagcccaagtctcaagcctccaaacctgcctacggaactctccatactggacaaactaaacccagaagagaggggtgggctggggcaaggcttatcctgggcaggagagaacacacgagcacgtatttgggagcccagtgccctttcctagaattccccgacatgtgtcagccatgcctctgtggggagtctgcctcccagactgggctactgtatgtaatgtatttatgtatgtattngtaaatgtgatagaagtctgggggggagttgggggatggcggcagatgttagccaggtctgccctccccattcaagccccttctccactgtagcaaaataagcacccccaccccatctgccttcaggtcttcttcacagcctgcactgcccagtgggccactaggggcagtctctggaagggctggttcaaggctgtttgggtataggggtcaggtaccaatgaagaatcacgacttgtctcactcctttggaaattgttttctttcctgtgtaattacttcatacctctgtttttgagaaactgttccgtttgtcatctgtcatggtctccttccaccaaatcttcatctgggaatagcagcggtatccctccacccaagtatggccacctgtttgtcttcatatagaacaggggcttctggtctggtcatgtccctagagacttactagagactggctgaccatgaaaaaaaaaaaaataatctgagttattcagccagtcagctcccctttaaaaatctaaggtatctccaagcaacacatctccattctagttgtcttgaaccacgtgggcaactgtttcaggggttttctcttgcccaatccccacctaataaagttctgagagcatgaaaaaaaaaaaaaaa

SEQ ID NO: 220 - DNA, 2493 bp, Homo sapiens
tgggctaccagtgggctcccatcctagccaacttcctgcacatcatggcagtcatcctgggcatctttggcaccgtgcagtaccgctcccggtacctcatcctgtatgcagcctggctggtgctctgggttggctggaatgcatttatcatctgcttctacttggaggttggacagctgtcccaggaccgggacttcatcatgaccttcaacacatccctgcaccgctcctggtggatggagaatgggccaggctgcctggtgacacctgttctgaactcccgcctggctctggaggaccaccatgtcatctctgtcactggctgcctgcttgactacccctacattgaagccctcagcagcgccctgcagatcttcctggcactgttcggcttcgtgttcgcctgctacgtgagcaaagtgttcctggaggaggaggacagctttgacttcatcggcggctttgactcctacggataccaggcgccccagaagacgtcgcatttacagctgcagcctctgtacacgtcggggtagcctctgccccgcgcccaccccggcgcctcgccctgggctgaccgcagctgccgcgagctcgggccaaggcgcaggcgtgtccccctggtggcccgcgctctcactgcagcctgtgcccaaccccgcgtctgcatctggagatgcggacttggacgtggacttggacttggacttggatttgagcttggctcttcgcagcccggacttcggaggagtggggcggggcgggggaggggcaccacgggttttttgttttttgtttgtttgtttttaatctcagccttggcgtgagctggggccttcctctcttctccagcctctccctttcactcttcgcccagcatcctgcccccctgtccaaaaacagcaggacatcaggcccatcccatcccaccacactcactcaccagctctggggaaagctactgtgaactaggagcaggattcctgggttctaatcgcaggtccatcactgactgtgacgtctagcaaagcccttgccctctctgagcctcggtttccgcacctcaagtaattaatcccttagcaaatggactcttttagacttctcatttaactcaattccctgagctagactgggattaaaattctcattttgcagtacattaaaactgatgcccagagatgtgatttgcttgaggccacacagctagatttttggtggaagtgggccttgaacacagtgtactttctgcagtttctgactgtaaaacccagtgtctgctctctgagttccatttccaagcccccctccatcttggacctatgtggtctccaccatattcacacaccaccaccaccacttgccaatgcctctcttaaagcaatatacccattcgttctcttattgggaactggatggatgaagccccaaattcagccccacccacagagaagccttcctacactcagcctctgtccacccttggcaaatctttcaagctctctcctccaggaaagtggggccccaactcagtcactccacccccttccaggtccctgaggctggttctactgtatccccatcacctccacaactccactcacccctgacggctccatccacctcaccagttggaaggcttgtggtttcagagaggagcaatgctggtcagcgctgcccagactccagtgtttacagatcaccagcatttacaaccaatccaatggccagaagcctcctctaacaagcccagaaggagttctgaaggggcagatgggggtgtgagtagtcggggagtcgggattgccagcaccctcacccttccttgggggcaagtagaggtgagaacactttccccacctccctccacagacactcctgaggacgctgcatcccacgcactgcctggtgcgtccatagagagaggatcaggtctcagcatttcatctgtgaaagaggcatggccctgggttagaaaggagggcaggagacatggaggaactggggggcacccagatggtgcagatggtttgcacacctgagcctgtctgtggtgaccattccgctcctctcccactaccctccaatctatcattccctactctctaaggccaaaatatcctgagcaaggctggcaaccccaccccaccatcccaaatgcaagcagccaggcccaggagttcctctggcccccacaggcatggagctcccagctggtgggtacagcttgagaggggggcagctccctcaggctaagctactgcccttcactgggccagccctgcctccagccctcacctctctcaccccaactctcccccaagcccctttctactcaacgggtgtagccactggtgctttgaagccttttgtttttataagatggtttttgcaaggggaccaggttctcttttcactgggaccttgcaaggaggggagtgctctcctggtttctgtgcaggcgggttgattaaagatggtgttttcttctct

SEQ ID NO: 221 - DNA, 1003 bp, Homo sapiens
tatacacagcccagccagcacccaggtccttccatccttctgctgcacatggggcgcctgacggaagcggcggcagcgggcagcggctctcgggctgcaggctgggcagggtcccctcccacgctcctgccgctgtctcccacgtcccccaggtgcgcggccaccatggcgtccagcgacgaggacggcaccaacggcggcgcctcggaggccggcgaggaccgggaggctcccggcaagcggaggcgcctggggttgttggccaccgcctggctcaccttctacaacatcgccatgaccgcggggtggttggttctagctattgccatggtacgtttttatatggaaaagggaacacacagagggttatataaaagtattcagaagacacttaaatttttccaaacatttgccttgcttgagatagttcactgtttaattggaattgtacctacttctgtgattgtgactggggtccaagtgagctcaagaatctttatggtgtggctcattactcacagtataaaaccaatccagaatgaagagagtgtggtgctttttctggtcgcgtggactgtgacagagatcactcgctattccttctacacattcagccttcttgaccacttgccatacttcattaaatgggccagatataatttttttatcatcttatatcctgttggagttgctggtgaacttcttacaatatacgctgccttgccgtatgtgaagaaaacaggaatgttttcaataagacttcctaacaaatacaatgtctcttttgactactattattttcttcttataaccatggcatcatatatacctttgtttccacaactctattttcatatgttacgtcaaagaagaaaggtgcttcatggagaggtgattgtagaaaaggatgattaaatgatctctgcaaacaaggtgctttttccagaataaccaagattacctgagtccaagttttaataacaagaataaacaactttgtgaa

SEQ ID NO: 222 - DNA, 1724 bp, Homo sapiens
tgcagcctcggccccgcgggcgcccgccgcgcacccgaggagatgaggctccgcaatggcaccttcctgacgctgctgctcttctgcctgtgcgccttcctctcgctgtcctggtacgcggcactcagcggccagaaaggcgacgttgtggacgtttaccagcgggagttcctggcgctgcgcgatcggttgcacgcagctgagcaggagagcctcaagcgctccaaggagctcaacctggtgctggacgagatcaagagggccgtgtcagaaaggcaggcgctgcgagacggagacggcaatcgcacctggggccgcctaacagaggacccccgattgaagccgtggaacggctcacaccggcacgtgctgcacctgcccaccgtcttccatcacctgccacacctgctggccaaggagagcagtctgcagcccgcggtgcgcgtgggccagggccgcaccggagtgtcggtggtgatgggcatcccgagcgtgcggcgcgaggtgcactcgtacctgactgacactctgcactcgctcatctccgagctgagcccgcaggagaaggaggactcggtcatcgtggtgctgatcgccgagactgactcacagtacacttcggcagtgacagagaacatcaaggccttgttccccacggagatccattctgggctcctggaggtcatctcaccctccccccacttctaccctgacttctcccgcctccgagagtcctttggggaccccaaggagagagtcaggtggaggaccaaacagaacctcgattactgcttcctcatgatgtacgcgcagtccaaaggcatctactacgtgcagctggaggatgacatcgtggccaagcccaactacctgagcaccatgaagaactttgcactgcagcagccttcagaggactggatgatcctggagttctcccagctgggcttcattggtaagatgttcaagtcgctggacctgagcctgattgtagagttcattctcatgttctaccgggacaagcccatcgactggctcctggaccatattctgtgggtgaaagtctgcaaccccgagaaggatgcgaagcactgtgaccggcagaaagccaacctgcggatccgcttcaaaccgtccctcttccagcacgtgggcactcactcctcgctggctggcaagatccagaaactgaaggacaaagactttggaaagcaggcgctgcggaaggagcatgtgaacccgccagcagaggtgagcacgagcctgaagacataccagcacttcaccctggagaaagcctacctgcgcgaggacttcttctgggccttcacccctgccgcgggggacttcatccgcttccgcttcttccaacctctaagactggagcggttcttcttccgcagtgggaacatcgagcacccggaggacaagctcttcaacacgtctgtggaggtgctgcccttcgacaaccctcagtcagacaaggaggccctgcaggagggccgcaccgccaccctccggtaccctcggagccccgacggctacctccagatcggctccttctacaagggagtggcagagggagaggtggacccagccttcggccctctggaagcactgcgcctctcgatccagacggactcccctgtgtgggtgattctgagcgagatcttcctgaaaaaggccgactaagctgcgggcttctgagggtaccctgtggccagccc

SEQ ID NO: 223 - DNA, 842 bp, Homo sapiens
gtggtatgtaccttagctgtgaggggggctgctgaaggcatggaggacagtaatgacggctgtgcctccttggatggtggagacctcagaaatggtctgctacacaggcactaggtcagtttcccgcccttagctgaatgcagatggatgctgggagatggatatggtgagatggtgtggggaggatgttagaaagctggaggtgtttatcacttctcaaggagctactgaatatagggggaaaaaaacaacaaaaagacaagcccagggagaaagcaccattaaggatatacctatgccagcttctatagctgcacctgctttattggcaggtcacttgccacaattgcatctgccctctaaactttttaattttcacactgtatcctagacatgaatgcataaaatacagtgtctggcgggataatgcagagaggtaccatcttgattttccccagttacattcacctggtctggtctctgtaagcttagaagagtagaatcactttattttttaaagacttccggccaggcacggtggttcacgcctgtaatgccagcactttgggaggccgaggcgggtggaccacctgaggtcaggagttcaagaccagcctggccgacatggcgaaaccctgtctctactaaaaaaaaatacaaaaagattagctgggtgtggtggtgtgtgcctataatcccagctactcaggaggctgaggcaggagaattcttttaacccaaaaggcggaggttgcagtgagccaagatcacaccactgcactccagcctgggcgacagaatgagactctgtctcaaaaaaaaaaaaaaaaaaaaaaaaaaaa

SEQ ID NO: 224 - DNA, 992 bp, Homo sapiens
agcgtttaaacttaagcttggagttatttccaccatgcccgggcaagaactcaggacgctgaatggctctcagatgctcctggtgttgctggtgctctcgtggctgccgcatgggggcgccctgtctctggccgaggcgagccgcgcaagtttcccgggaccctcagagttgcactccgaagactccagattccgagagttgcggaaacgctacgaggacctgctaaccaggctgcgggccaaccagagctgggaagattcgaacaccgacctcgtcccggcccctgcagtccggatactcacgccagaagtgcggctgggatccggcggccacctgcacctgcgtatctctcgggccgcccttcctgaggggctccccgaggcctcccgccttcaccgggctctgttccggctgtccccgacggcgtcaaggtcgtgggacgtgacacgaccgctgcggcgtcagctcagccttgcaagaccccaggcgcccgcgctgcacctgcgactgtcgccgccgccgtcgcagtcggaccaactgctggcagaatcttcgtccgcacggccccagctggagttgcacttgcggccgcaagccgccagggggcgccgcagagcgcgtgcgcgcaacggggaccactgtccgctcgggcccgggcgttgctgccgtctgcacacggtccgcgcgtcgctggaagacctgggctgggccgattgggtgctgtcgccacgggaggtgcaagtgaccatgtgcatcggcgcgtgcccgagccagttccgggcggcaaacatgcacgcgcagatcaagacgagcctgcaccgcctgaagcccgacacggtgccagcgccctgctgcgtgcccgccagctacaatcccatggtgctcattcaaaagaccgacaccggggtgtcgctccagacctatgatgacttgttagccaaagactgccactgcatatgaactagtactaagccgaattctgcagatatcc

SEQ ID NO: 225 - DNA, 953 bp, Homo sapiens
agacccagtcaggacacagcatggacatgagagtcctcgctcagctcctggggctcctgctgctctgtttcccaggtgccagatgtgacatccagatgacccagtctccatcctcactgtctgcatctgtcggagacacagtcaccatcacttgtcgggcgagtcaggacattagcaattatttagcctggtttcagcagaaaccagggaaagcccctaagtccctgatctatggtgcatccagtttgcaaagtggggtccaatcaaagttcagcggcagtggatctgggacagatttcactctcaccatcagcagcctgcagcctgaagattttgcaacttattactgccaacagtataaaagttatcctgtcacttttggccaggggaccaagctggagatcaaacgaactgtggctgcaccatctgtcttcatcttcccgccatctgatgagcagttgaaatctggaactgcctctgttgtgtgcctgctgaataacttctatcccagagaggccaaagtacagtggaaggtggataacgccctccaatcgggtaactcccaggagagtgtcacagagcaggacagcaaggacagcacctacagcctcagcagcaccctgacgctgagcaaagcagactacgagaaacacaaagtctacgcctgcgaagtcacccatcagggcctgagctcgcccgtcacaaagagcttcaacaggggagagtgttagagggagaagtgcccccacctgctcctcagttccagcctgaccccctcccatcctttggcctctgaccctttttccacaggggacctacccctattgcggtcctccagctcatctttcacctcacccccctcctcctccttggctttaattatgctaatgttggaggagaatgaataaataaagtgaatctttgcaaaaaaaaaaaaaaaaaaaaaaaaaaaa

SEQ ID NO: 226 - DNA, 6938 bp, Homo sapiens
  modified_base (297)..(298): a, c, g, or t
  modified_base (300)..(302): a, c, g, or t
  modified_base (305)..(306): a, c, g, or t
  modified_base (308)..(308): a, c, g, or t
  modified_base (310)..(310): a, c, g, or t
  modified_base (312)..(313): a, c, g, or t
  modified_base (601)..(602): a, c, g, or t
  modified_base (1534)..(1534): a, c, g, or t
  modified_base (1589)..(1589): a, c, g, or t
  modified_base (1602)..(1603): a, c, g, or t
  modified_base (3093)..(3093): a, c, g, or t
  modified_base (3095)..(3095): a, c, g, or t
  modified_base (3333)..(3333): a, c, g, or t
  modified_base (3345)..(3345): a, c, g, or t
  modified_base (3370)..(3370): a, c, g, or t
  modified_base (3816)..(3817): a, c, g, or t
  modified_base (3853)..(3853): a, c, g, or t
  modified_base (3911)..(3911): a, c, g, or t
  modified_base (4761)..(4761): a, c, g, or t
  modified_base (4778)..(4778): a, c, g, or t
  modified_base (4813)..(4813): a, c, g, or t
  modified_base (4843)..(4843): a, c, g, or t
  modified_base (4858)..(4858): a, c, g, or t
  modified_base (5147)..(5147): a, c, g, or t
  modified_base (5384)..(5384): a, c, g, or t
  modified_base (6368)..(6368): a, c, g, or t
  modified_base (6393)..(6393): a, c, g, or t
  modified_base (6687)..(6687): a, c, g, or t
  modified_base (6806)..(6806): a, c, g, or t
  modified_base (6808)..(6808): a, c, g, or t
ttttaatggtctgggcaggcttttattggtagcattcccaaaatccaaataagaactgttatttctatagttggaaattgttagtgtttgtgacttaatagtattaccacatatttctgattcatctatatgaacttatataatcttatagtttggacttggaagtcaaacaaaactcacacatgtatttaggcatataaatactcaaatttaagatatacaggtcaaaatataaccagtttaggggaaaatgatgttgtaaactaaatattgagaatgaaactgaaaacaattagnntnnnttnntntntnntacactttgagacatatgttttattattacagtttattcagtcatgaaaaatctattgcttgccctttttatcaataatactactctgacatttttaagggcagaggcagtgataattggtgtcatgttgcctttgtgggtaatgttgtagatagattttcatttataagccagtacatacatgatagaaggtatccgttgtatcttttaaacaaatggcaaacaaagtataccaccacatctccttttcactattggaaatgaaatagatctaatatggtcaaaggnntttttttttttttttttttttgacatgacaaaagcgtgcatttaatttgatgctttgcagagatacatgaccaaagttgtatgcatggcttgtcttttgggatggtcccagctgtttattttaaaagaaaaaaattaaaatagagccaacaaatgcaattaagaaaaaaaaagtattgagacacaaggggacctacatgttctggtctaagaagcatgcaagtattacaaagcattccagatacagtatgacagaggaacagtgaacaagcattggaacgatgctctttctttcagaaacgggaagtctaacagttatgttttcacaatggtagtgattaaaccatctttatttttaaggaattttataggaagaattttagcaccatcattaaaggaaaaataataatacctttttagccctgcctatctccagtcttggaataataacagaagcatagcacctttcagtatctaaaatataaacaagaatagtaagtccatcccagcttctagagatgaggtagctcatgctaagaaatgttgggtcatttttcctatgaaagttcaaaggccaaatggtctaattccaatcatcacatttgattagagtcagctccacaactcagtttctagatctttttcttcattataggcttcaggatgatgagattgtacatgtggaagagtctcaatttagagtccttggacatatgtttgtaaagttctatatgtcaattattttgcattcaatatcttcttaaataagaaagtgtaaatgtattaaatggtatatactagtgtgacttctatcaatattgatagattgatcaagaggagaaagatatctttaaatttgaatgagaaagatgtctaaacttatagtcttttacaaaaatttaagaagtcgaagtaaattcactttgttctccnaaaatgccactgaatatatactatttaaaaattctatttaagacagtgagaaacnttttttttttttnnaagattctccttaaagagtctctattatagttacacaatatcaagacatgcatgtaggtctcgatcacaagttaaacattttaaactcatttttaattgacaatcttggaatgagaggtcacaaaagggcactaatttctatttttcaactgcagccaagcaaaataaacatgtgttgtggctctatataccccactctttaagctacctgccaggaagaagaatttcctcataaatactaagcaactttttcattacactgaaataaattgaagaaaacggagatttatttattcaatcagtttactttctgcaaaggtggtcattgtcattggtcatcttaaacctaaactgttgtattgaaaaatatttaaaatcaattaaaacttgaggattgtaagtaaaataaatattctgaaggataaggaggccaggcacttaagaccatatatacaatgctgatgcaggatcagccattacttcaagagtctcaggatcaacttcaaacagtcaaagttcttgtgaatggcggtggtcattgatggtggtgctcattgtcgatgtgtcttggcttactttacacaaaacaaactggcccaatttcaacgccgaattcctggtctgtgccgccaacatccacaggagcaagatctatgatgggcaagcgtgccacattctgtgttctatattcaaagacagtcttgcccacatttccattccgcttagagcaagtgtcttgaagaacgatataccggaatctaatatttccctctgctttgatatctaagtcatttgcccctttgagaaccacagcttttttgaggttcttagcttgatcgtccatgtatcctacactgtttttacagatgtaagtgatgttctgggaggcttcttttgataaaaggcgcaaaaaagtcatctgagtaatggctgtattaggtgattggtggtctccataagcgaactgagaccctctgttcatatcaagaccataccaaacaggtttattgtcaggagatttactggcccaccaggttttacgtggtacactggatgggtttgctgaaatacatgtttctcctgtttccatgttgcagtaaactttgattgcatcttcaacagatccttggttaggatcaatccagtattcaccactctgctttgcggaatggcaaagctttaggtcatcacacgtgcgggctgggtgctttttcgagccatcggggctgcgcatggtttcaatctgactactgagtgacttcagggtagcatgaacccctgggtccgttttgtttttgtcatcaggagccgcctgatcttcagtaaactcaggaagtggatctggcatgctttcatcatagtgccccatgatatccccaagagcagctgtaaggtggccagggggacccggagggccaggtgggccaggctcaccaggagggccctcaggtcctgcttctcctacactgcctcgtacacctggaggtccnantggcccaagtggcccagggtttccttctttacctgaaggaccaactgggcctggaggacctcttgggccaaatggtccagggattccagcacttccttgttcaccatttggaccaggagggccaggaagaccctgaagaccagtaaagcctctgtggcccttctgacctctgtcgcctcggtctccatgatcacctttgtcaccacgaggtccttggggtccaggtaatccacgtttnccagctcgaccnaggtgtcctataggaccccgagaanccggatctcctctttgtcctgcatctcctggagcacccacagggccaggagttccaggggcaccctgagagcctggcagacctgcaggcccagggtctccacgatcaccacgttctccaacagcaccatcccgtcctggggtaccatcattgccagctggaccttctggtccaggttcccctacaggaccattggagcctgggggccccacaggtccaggtggacctttatctcctgttgcaccagttggtcctacttttcctggtgttcccgctgggcctggtaggccgggcatgcctctctctccacgttgcccaggcatgccaacaattcctctctgcccggtcgttccagctggaccaggggggccatctggaccaggttgcccatcttctcctgggtcccctttgtctcctgggccaccaggggggccagctggtcctcgnnctcccacacgcccatgagagccagggtccccacgangacctggaggtccctccttcccgggttcccctaggggtcccgcaggtcctggagctcnagcagggcctggaggtccaactctgcccgcagaaccaggaaatcctgtagcaccaggcggaccttgggttcctcgaccaccttttagtccaggaacaccattaggaccatgagggccaggggatcctgctaaaccttgtggtccaggagaaccagcatctcccttctgtcctggctctccaggttcaccttttactccaggctgtccgtcagacccctggggtccggcaaaaccaacagctccagttggcccattttcacctcgagaaccaggattgccccgggagccaggaggaccaactaaacctcgaggaccaggttcacccttttctcccagtaggcctgccggacctggagggcccaaaggacctggaagacctcctgcaccatcatttccagctgtgccttcagcacctttttctcctatgccacctctgtcacccttggggccaggagttcctgcaattcctctttctcccggcataccttgaagacctggtgggcctgtatctccaggggtcccagatggacctggactgccttttgggccatcaggaccatgtcctccagccattcccttctcaccagggagtccagttatcccaggttctcctctttccccaggatttcctcgttctcctctaggtcctaacgggccaactgctccgggacctccaggaacaccttgatcacctggttttccaccttctccaggaggacctggaggaccaggatgcccctgaaaacctgtgggccctggaggtccttgttctcctctttcaccacgtagacccggcggcccaggaggaccataaggaccaactttaccatcttttccaggagctcccctntgcccaggaactccagnatttcctgcttctccaggtttcccagggtcaccantgctacctttggggcctggaaggcccatgntcccgggctgccctntgattcctatggagcctggaggacctggacggccatcttcccctggcgcacccaaaggtccaagttttccttcaggaccttgaacaccaggatttcctgtcaaaccccgagcacctggaagcccaggttcccctggacgtcctggatccccctggcttcctttgggtcctgaagaacctacaggaccccgttctccttgagcaccctttggcccaggtaaaccatcagagcctggaaaaccacgattgccaggagcacccctttctcccactggccctggaggaccaantgttcctgggtcacctctgggacctcttttgccttcttcaccgggtgggcctatcggaccctgaataccatgtggccctggttccccttttgggccagcttctcctttgaaacctggatcacccggaaggcccgaattcccctgaggaccagtgctaccctgaggtcctggagatccaggaggccctgctgagccaggaggaccagaggtacccggagagcccgttgggcctttggnaccaggagtaccatcagttcctattgcaccaggaagacctggagagccaactggacctgggggcccagtttcacctctctgcccctgaggaccttcagggcctcgcgcccctgtaggacctgcttctcccttcattccaggatttcctggaaaaccagaagagcctggtatcccaagaggacccattggtccaggttttccaggcataccatgtgcacctcgttgtccaggagcaccctgtggcccaagtctccctctctctcctggcattcccctcggacccagaggacccatggcacccattggaccagtggggccagcttcacccttggaaccaggtgctccaacttcacctttagggccttcaagacctttgtgtcctcggtgacccttcagacctggaagaccaggagccccaggaaatccacgagctcccggagatcctgcaaatcccacttcaccaggatttccatttctgccaggttcaccatcttccccaggtttaccaggagggccctctggtccacgtgaaccaatcggacccattggtccaggatcaccaggttcaccaggaggtcctgtaggtcctgcaccaccttgctgtccttgtaaaccctgtggtccccttgggccaacaggacccacagagccaggcattagtcctacttgactcccaagtccagatttttcatccaacccagccatttgagctgaaaacggcctgctcaagccatcgggtcctgggtgggacggatgtccaggaggtcctggagcaccaggttgaccaggaacacctggttctccatcaattccctgaggtccacgagggccaggtcttccttttggccctcgctctcctcttggtccctgtgatcctggaggtcctgccggtcctggacgaccacgtatgcctgttacaacaggcactaatcctggttctcccttttgtccctttcttcctctaccaaaatttgtattgccacntccaggtgtttgtgaacagacaggncagcattccccagggggcgttacagggtcggcacagtccagcacatcctggcattctatcttgtcacagagaatggctccattgtcacagacacagatctgacaaggggcaggtttccaaatgtccctgtttaagtacatctggccattctgagtgcaggctatttcttcaccatatccttcatcctcgtcttcttcctgggcttttattgagacaaattgccctaataaaacaataagaatgaggagaggtcttgcttccgcccagtttgccatcatgtctaaatattagacntgtgggttctcctgagagtgaaaagtagattctgaggttattgtagcaccatgaagtcagctgtgggctcttctttcagcaccagccccagggcagcctctgcaaaccccctttttcancnccagctccagcacagtctgcgaaaacttttttcaagcgatgcagctttaaataggaagaatgctgcctccacttcttttcctgccccttttcagcttgttcaggctcataaccatccagtgtctgccaag

SEQ ID NO: 227 - DNA, 6938 bp, Homo sapiens; identical to SEQ ID NO: 226
  modified_base (297)..(298): a, c, g, or t
  modified_base (300)..(302): a, c, g, or t
  modified_base (305)..(306): a, c, g, or t
  modified_base (308)..(308): a, c, g, or t
  modified_base (310)..(310): a, c, g, or t
  modified_base (312)..(313): a, c, g, or t
  modified_base (601)..(602): a, c, g, or t
  modified_base (1534)..(1534): a, c, g, or t
  modified_base (1589)..(1589): a, c, g, or t
  modified_base (1602)..(1603): a, c, g, or t
  modified_base (3093)..(3093): a, c, g, or t
  modified_base (3095)..(3095): a, c, g, or t
  modified_base (3333)..(3333): a, c, g, or t
  modified_base (3345)..(3345): a, c, g, or t
  modified_base (3370)..(3370): a, c, g, or t
  modified_base (3816)..(3817): a, c, g, or t
  modified_base (3853)..(3853): a, c, g, or t
  modified_base (3911)..(3911): a, c, g, or t
  modified_base (4761)..(4761): a, c, g, or t
  modified_base (4778)..(4778): a, c, g, or t
  modified_base (4813)..(4813): a, c, g, or t
  modified_base (4843)..(4843): a, c, g, or t
  modified_base (4858)..(4858): a, c, g, or t
  modified_base (5147)..(5147): a, c, g, or t
  modified_base (5384)..(5384): a, c, g, or t
  modified_base (6368)..(6368): a, c, g, or t
  modified_base (6393)..(6393): a, c, g, or t
  modified_base (6687)..(6687): a, c, g, or t
  modified_base (6806)..(6806): a, c, g, or t
  modified_base (6808)..(6808): a, c, g, or t

SEQ ID NO: 228 - DNA, 662 bp, Homo sapiens
  modified_base (440)..(440): a, c, g, or t
  modified_base (514)..(514): a, c, g, or t
  modified_base (540)..(543): a, c, g, or t
  modified_base (587)..(588): a, c, g, or t
tttacaggaacacagatttgatgttttaataaaaatacgatttctacaaaaggtgcttaacacggcccaggacgggctgtccggtggagtcagccgtaggacccctgaaggatttacaaagacagagccggctcaccagcacactcctgccagcaccgggacccactgcgaacaaagacagagccggctccccagcacgctcctgctagccctgggacccactgtgagccactgcggggtgtccttcatttaaaaaaagtctggactgtgacactgcagaaggagtctgaaagcccaattcctgaatccctgcgttagaactgagagttcaggccgggcgcggtggctcatgcctgtaatcccagcactttgggaggctgaggcgggtggatcacctgaggtcaggagttgaagaccagcctgaccaacatgatgaaacnccatctctaataaaaacttgcccgtaatcccagcactttgggaggccgaggtgagtagatcacgaagtcagganatcgagaccatcctggctaacacggnnnnacactgtctctaataaaaatacaaaaaaattagccaggtgtggnngcgggtgcttgtagtcctggctactcgggaggctgaggcaggagaatggcgtgaacccaggaagcggagctggc

SEQ ID NO: 229 - DNA, 4590 bp, Homo sapiens
  modified_base (668)..(668): a, c, g, or t
  modified_base (709)..(709): a, c, g, or t
  modified_base (745)..(745): a, c, g, or t
  modified_base (752)..(752): a, c, g, or t
  modified_base (763)..(763): a, c, g, or t
  modified_base (768)..(768): a, c, g, or t
  modified_base (777)..(777): a, c, g, or t
  modified_base (788)..(788): a, c, g, or t
  modified_base (1097)..(1099): a, c, g, or t
  modified_base (1101)..(1104): a, c, g, or t
  modified_base (1656)..(1656): a, c, g, or t
aacatggtcatttttattaaagtaaaaaataagatagtagtagctctggacatttggaaatgtgtatgtttgtttacaccctgtgaaaagtagacatggtctgcaaaagagccaatctcctaaatatatttctttctctagaaatgttattttgggacaaatgaatgaatccctgttgggaaaaaagaacctgctgcatatcatccatattttattttattattattttttttgagatggagtctcactctgtctcccaggctggagtggagtggcacaatctcggctcactgcaacttctgcctcctgggttcaagcgattctgctgcctcagcatgcccagtagctgggattacaggtgcatgccaccacacccggctaatttttgtattttagtagagacggggtttcactatgttggccatgctggtcttgaactcctgacctcaagtgatccacccgcctcggcttctggaattacaggtgtgagccaccgcacccagccatgatccatactttaatgtgggttctggattgcttcctaggccacgtgtttaacatgccacatgatgatgcaaagcagtgtgccagccttaatggtgtgaaccaggattcccacatgatggcgtcaatgctttccaacctggaccacagccagccttggtctncttgcagtgcctacatgattacatcatttctggataatggncatggggaatgtttgatggacaagcctcagaatccnatacagntcccaggcganctccntggcacctngtacgatgccnaccggcagtgccagtttacatttggggaggactccaaacactgccccgatgcagccagcacatgtagcatcttgtggtgtaccggcacctctggtggggtgctggtgtgtcaaaccaaacacttcccgtgggcggatggcaccagctgtggagaagggaaatggtgtatcaacggcaagtgtgtgaacaaaaccgacagaaagcattttgatgtgagtttttctactgaaacacattcagaattgaaaagaacaaagtgatggtaaaagatatgataccaagttaaacatccccatccgtgtcctctannngnnnngcgagatagcttatttttagaactgattctttgtcccatgtggctttctttgataccctaaaagttctctttagataattctaatgctgatgatttatgtctccatttagacgccttttcatggaagctggggaatgtgggggccttggggagactgttcgagaacgtgcggtggaggagtccagtacacgatgagggaatgtgacaacccagtcccaaagaatggagggaagtactgtgaaggcaaacgagtgcgctacagatcctgtaaccttgaggactgtccagacaataatggaaaaacctttagagaggaacaatgtgaagcacacaacgagttttcaaaagcttcctttgggagtgggcctgcggtggaatggattcccaagtacgctggcgtctcaccaaaggacaggtgcaagctcatctgccaagccaaaggcattggctacttcttcgttttgcagcccaaggtagttcgtttttaccttatttttacctaaaaatcaaggcctgggcttgctaccttttcaaacaatttttgttatactntctttgctttccatattaacatatcttcaatttcaaatttgaactccttttcttttacattaattggcaactgcctgctttgagtttagtgttttcagttatgaatgaagcttaaatctaacacttcacatgcttgcaattgctcgctattactcttttatatgcaaagaaaagctttttggacagtcaagcgctcctctgtgcgactaggcttcacatacagctcatagttagatacattttatattcacacagtaaccagtagttttggaaaatagtctatgcatggtccaaaatacttgttactgggtaactagcagtagcaggtgcaaacagaataatagaagtggtagtctgagtattgattatttttatgtttgaaaacacatattgaactaggaaaagcatcatttcttttgctgttttgctaagggaatacatctggatctgagacagaaaatggaatttaatgtgattgagatgatcgtgtgtcattagcaccataggctatgaaaatattcccaagttgcagattcaatattcagcaagtgatttctgaagcacttactcttgccagatactaattattctaggctctgaagatacagcagtaaacaaagtgacaaacagctctactttcattgaccttagctggaggagacataggtcaatagataaataatttttaaaaatatctaatttcttcagatgtctatacgtagtactgaaaaatatgccaaagtgaagggtaaatgcatgaaatgcataatgtgtagagggtactgtgtttaattagcatggtcaggaaagtagagagaaaatgtttacacttatcattgcagcatctccttcctttgcttgtatgtaacactagacatgtgtccttttttcaggttgtagatggtactccatgtagcccagattccacctctgtctgtgtgcaaggacagtgtgtaaaagctggttgtgatcacatcatagactccaaaaagaagtttgataaatgtggtgtttgcgggggaaatggatctacttgtaaaaaaatatcaggatcagttactagtgcaaaacctggatatcatgatatcatcacaattccaactggagccaccaacatcgaagtgaaacagcggaaccagaggggatccaggaacaatggcagctttcttgccatcaaagctgctgatggcacatatattcttaatggtgactacactttgtccaccttagagcaagacattatgtacaaaggtgttgtcttgaggtacagcggctcctctgcggcattggaaagaattcgcagctttagccctctcaaagagcccttgaccatccaggttcttactgtgggcaatgcccttcgacctaaaattaaatgcacctacttcgtaaagaagaagaaggaatctttcaatgctatccccactttttcagcatgggtcattgaagagtggggcgaatgttctaagtcatgtgaattgggttggcagagaagactggtagaatgccgagacattaatggacagcctgcttcagagtgtgcaaaggaagtgaagccagccagcaccagaccttgtgcagaccatccctgcccccagtggcagctgggggagtggtcatcatgttctaagacctgtgggaagggttaaaaaaaagaagcttgaagtgtctgtcccttgatggaggggtgttatctcatgagagctgtgatcctttaaagaaacctaaacatttcatagacttttgcacaatggcagaatgcagttaagtggtttaagtggtgttagctttgagggcaaggcaaagagaggaagggctggtgcagggaaagcaagaaggctggagggatccagcgtatcttgccagtaaccagtgaggtgtatcagtaaggtgggattatgggggtagatagaaaaggagttgaatcatcagagtaaactgccagttgcaaatttgataggatagttagtgaggattattaacctctgagcagtgatatagcataataaagccccgggcattattattattatttcttttgttacatctattacaagtttagaaaaaacaaagcaattgtcaaaaaaagttagaactattacaacccctgtttcctggtacttatctaatacttagtatcatgggggttgggaagtgaaaagtaggagaaaagtgagattttactaagacctgttttactttacctcactaacaatggggggagaaaggagtacaaataggatctttgaccagcactgtttatggctgctatggtttcagagaatgtttatacattatttctaccgagaattaaaacttcagattgttcaacatgagagaaaggctcagcaacgtgaaataacgcaaatggcttcctctttcctttttttggaccatctcagtctttatttgtgtaattcattttgaggaaaaaacaactccatgtatttattcaagtgcattaaagtctacaatggaaaaaaagcagtgaagcattagatgctggtaaaagctagaggagacacaatgagcttagtacctccaatttcctttctttcctaccatgtaaccctgctttgggaatatggatgtaaagaagtaacttgtgtctcatgaaaatcagtacaatcacacaaggaggatgaaacgccggaacaaaaatgaggtgtgtagaacagggtcccacaggtttggggacattgagatcacttgtcttgtggtggggaggctgctgaggggtagcaggtccatctccagcagctggtccaacagtcgtatcctggtgaatgtctgttcagctcttctgtgagaatatgattttttccatatgtatatagtaaaatatgttactataaattacatgtactttataagtattggtttgggtgttccttccaagaaggactatagttagtaataaatgcctataataac

SEQ ID NO: 230 - DNA, 5661 bp, Homo sapiens
  modified_base (7)..(7): a, c, g, or t
  modified_base (2992)..(3001): a, c, g, or t
  modified_base (3003)..(3007): a, c, g, or t
  modified_base (3591)..(3591): a, c, g, or t
  modified_base (3634)..(3634): a, c, g, or t
  modified_base (3636)..(3643): a, c, g, or t
  modified_base (4305)..(4305): a, c, g, or t
  modified_base (4307)..(4307): a, c, g, or t
  modified_base (4332)..(4333): a, c, g, or t
  modified_base (4343)..(4343): a, c, g, or t
  modified_base (4346)..(4348): a, c, g, or t
  modified_base (4350)..(4350): a, c, g, or t
  modified_base (4352)..(4353): a, c, g, or t
  modified_base (4355)..(4355): a, c, g, or t
  modified_base (4360)..(4363): a, c, g, or t
  modified_base (4365)..(4365): a, c, g, or t
  modified_base (4605)..(4606): a, c, g, or t
  modified_base (4847)..(4847): a, c, g, or t
  modified_base (4873)..(4874): a, c, g, or t
  modified_base (4941)..(4941): a, c, g, or t
  modified_base (5059)..(5059): a, c, g, or t
  modified_base (5138)..(5138): a, c, g, or t
  modified_base (5231)..(5231): a, c, g, or t
  modified_base (5595)..(5595): a, c, g, or t
  modified_base (5608)..(5610): a, c, g, or t
  modified_base (5612)..(5613): a, c, g, or t
  modified_base (5615)..(5620): a, c, g, or t
ccaccgncccctcctccccctcctctccctaatcaagtaccccctcctcctccaccacctcctgccccacccctccctgcatctggattctttttggcatccatgtcagaagacaatcgccctttaactggacttgcagctgcaattgccggagcaaaacttaggaaagtgtcacggatggaggatacctctttcccaagtggagggaatgctattggtgtgaactccgcctcatctaaaacagatacaggccgtggaaatggaccccttcctttagggggtagtggtttaatggaagaaatgagtgccctgctggccaggaggagaagaattgctgaaaagggatcaacaatagaaacagaacaaaaagaggacaaaggtgaagattcagagcctgtaacttctaaggcctcttcaacaagtacacctgaaccaacaagaaaaccttgggaaagaacaaatacaatgaatggcagcaagtcacctgttatctccagaccaaaatccacacccttatcacagcccagtgccaatggagtccagacggaaggacttgactatgacaggctgaagcaggacattttagatgaaatgagaaaagaattaacaaagctaaaagaagagctcattgatgcaatcaggcaggaactgagcaagtcaaatactgcatagaggaacagactaaggagagataggactttaatctggaggaaaaatatcctacaaacaacaactgttcacaacagcaaacccctacatttatgagctgtaagaagaaaatggagacaaacagaaggagggaaaaaccaacctactctgaaagccttcagacattatgactctggtgataagctctttccctctccgtttgctgcttttttctggcctttacaacagaatggaagagaatcatttaagagttcctgtaacagttatgcagaaaatactaaaacccatcaggcaagatcaccacgcattgaaatattttcatatcaagataaagtcgcacattttccacaatacattgctaaaataaagaggagaaaggcttaggaagtttttttgcagagagtgctggtaaagaattgagcaagtttgctattgtattgtaatgtttctctcaggtttgttcttcctatcatgtttgatattccatgaataattgagatcagccctatgtaagttaagatcataatatgtggaacaaatggaattgtaagtgctttcaaagggtaatatttataagaaagtgtccgaaaaatgtttcttcagcttgagaaattttagaatgataggaagtttctcgagttagccttcatgcaattttgtagattaaaacataaaatttgtccagaacttaaagatttagatgccttcctaaattgttacaatgctttaccaaatctatgacttctacataacacaaaccagtggtcaaatgtaaacactatattgtagatttactgtaggttttcaaccttttttagatttatgcatgtggacatttttataatgtaattacaatcaccacaaggttagcttttttaattgcagacagtaatgcatgtcacactaatatgtagtggccttttcaaggcctagtcccagggaaaacattttgtagagtataggggagtgggaggaaggggaggaataattttttatttaaagttgatttctgcactatctttttctcagttacctgcatgaataaataatgagaaatattttgtgactttaattggtaaatatgttacaaaaccaagtacttaatcttttacatcatgtcttcagctatttgtattttaaccagtaatttcaatggtctgaaacatgattctgagcttcacataatatcttaactgtggaactcaaaagtttgatcactgaatttggcagttattattacctaggtacccccgctgttacacaggtgtttagatacgtgttcctgaatgaagctgcttttgaattttgttatgttgaaatgcaagaaataacaatgatggcagcaattaaggtcacagaaatcattaggtaaaggaaaaccaatgaggagttctgcagttttcttttaataagtaaagtgagacttgggtggtgggaagaaggaaggtgggaagaaggaattagacactctgcctgccactctgcgtgtgtgtgctctcgcgcacgtgctgtctatatggaagccactcccttttctttcctttgaaactggtaaggttaaaataggggagaaatcctacatgttggaatgatagctttttggaaaatttaagaaactctccaggctctccatcttgatttatgcttgagttgttatgtgccatatttgctttgaactctgattatcagaagttttactaaaactttgaaataattcactttcatctgctttctagattttgtacatctcagtccataaagcaaagcttgttgatagtgtagttttctaaacgctgcaaatttgcagcctttaccactacaaagaagtttggatgagggattttttttttctttgtcaaaatagttcctgtttctgtagaaatttcatttttagattaaactgtgatggatgagctatcataattcaagtatacatttcttttttctatcagatattcattgtcatgcagtagtagtaaaaacatcaaagatgcagcaagcttattaagtattattttctaaaagaaataggaggcattttcatctttattattgtacttttggttatgcaaacactttgataatataaacagttatgtcccctataaatctggtcagcaacctcttttgattttgttgggtaagttaaatagtctgtagtaggtagagtactgggtacaagtggtccaaactaagataagagactaaaataaaatgctaaatcttaaaagaaactgggtttatgcactaaacgttttgtgccttggtctaatattaacatgatgtatgtgtaaactgacaaaaaaaaaaaaaaaaaaaaaannnnnnnnnnannnnngctatatttcccatcatcccagattgctaaatgttctttccaagaagtctgaatgaattattatatacatttgctatcatacatgacagttgtgtcattattagagatttcagtaattaaaatgggaaacagaagcctaagttatttaccttatcaaaaccacgttccttggaaccacattattatgatggtttttgtgctcttgtacgttggatgtcttaagctgagtacagtttaggggatcctttctaatgacaggaaggcactgctttcctcaacactgtgatctgacctgtgacaagtctgtactatccactatgtaaatggctcacaagtcaattgcaaacaaactgaatgtacaaatcttagtgctggtgctgaaatctcttcagaatagtcatcatgatttaaaagtttgtttaaaaatttgcaagcatcaagtgtcaatcaaaactgaagatgaaacactaatgaatgttgaattctcatgcttttaggtgtacttcctttttagaattttcagttttctgctatttttaccgtaactatttcgtttaaatttgtttcatttaagtttcctacangctaacttcgtttgtgcgattgaaataaaattgcagtatatanannnnnnnngtttgtgacacttagataatcttctgaaataatttgttttaaagtaagttatattggatgtgaaaaacaccttttaaagtccaagactttactacttaaaagtttacatgtcacgtcactattctttacagatttcatagaagtcgtgaatactaagtaatgtatacaaaagaaatatgtgatgatgtgtctactttttgtttgaaataactgttgggtgttccctcttcttattttctctctgcccaccttgacacagtaacttcctcttatagtcaagatgatgattaagtgtttaatttttattccattttgttctgcaacacgttcagatacttaaaactcattcatgcagttagaattatcctttatgtagtttgcatggtaaaggacattgtgtggtaaagggcattattgagtaatgaattttaagtatagcaaaatatgtatagtgtttatacatgatgctgatttcttaaaacctacatataagcagtagtactttttctctattataaagtattaattttgagttccattttataattctgatgtcttcattagaaatacaaaaatacaatccttgtattttttctttgaccagacccaaattttccccttcccccctccattctcctctccacttctcgtggaccgcgtgntnccaatattcattaacatttgcagcnnttacagagtnacnnntntnnanttttnnnntnttttttttttttgctctagcctgtctcatgttcttgcttctcttcatatgtaagtcagtatttttgtctacaaattaaaagtcacttgtcattcaaaaatgagttaagtaacatgataatcttttaaatttacctagctacaacttttatgtctcttgtaaatttatatatactttcagtgccattgtgaagaattggccttttaattctaagtagtattaccctatgaagcacagtgtnnaaaggtatgctacaaggtctctttaattcctgtgtggccattataattttataacaccattaccctttaaattctaccgattataagcagcgtaaaagtaactatataaagcaaacatcgcaaaggaactctgcaggagctcttaattcctttatgtagctatcataaaattcactttcctgaagacatttactctcattcacttccaaactccaaacctttttctggtagcaccactttngtttttaatagaaagatgagttcatnnctgtacatctctccaaagctctaaggaatgagaaaaggatcctagtatattgaaattactgatgttnaatacctctgccttttcactaaaagccatttaatatttttaaagtcaaaacttgacatacaggtatttataaggaatctccatgactctgaaggaatgaaattgatgtaggtagcttnggctatgtaaagacatagtagaggacaattacttaaagaagagttttcttttgaggatttgtagatttgactaagcagnctgaagtcagtaacccctcaagaaaggccgtttatagaagccaagaactgttggaggtctgtgatgcaggtttttctgttcccaacatcaaangctgtggattatttggtgtgttcccctttatgttatctctcgataatttttgagacatcaagattttttaaaatatcaatactggaaagatgaaaccttcaaattaaaacctaaaattgattagaaagaaaagtaaaatattaatgcagtaaatttaggatggttacagatactcaccatcaacataaataaatggagttctaggataaattatttgtggaatactaatggtcaagtcacataagagtaaaatcttttggtgaggagacacatttgacaactgctaaagaattaactaaatttgtctttctaaatagttttctttataaagtaacagaaacattgtaaaaggataaataaatgnctgtcataatgannnannannnnnnaaaaaaaaaaaaaaaaaaaaaaaaaaaaaaaaaaaaaaaaa

SEQ ID NO: 231 - DNA, 3524 bp, Homo sapiens
  modified_base (4)..(4): a, c, g, or t
  modified_base (19)..(19): a, c, g, or t
  modified_base (680)..(680): a, c, g, or t
  modified_base (708)..(708): a, c, g, or t
  modified_base (832)..(832): a, c, g, or t
  modified_base (843)..(843): a, c, g, or t
  modified_base (852)..(852): a, c, g, or t
  modified_base (874)..(874): a, c, g, or t
  modified_base (902)..(902): a, c, g, or t
  modified_base (911)..(911): a, c, g, or t
  modified_base (931)..(931): a, c, g, or t
  modified_base (996)..(996): a, c, g, or t
  modified_base (999)..(999): a, c, g, or t
  modified_base (1002)..(1002): a, c, g, or t
  modified_base (1007)..(1007): a, c, g, or t
  modified_base (1014)..(1015): a, c, g, or t
  modified_base (1018)..(1018): a, c, g, or t
  modified_base (1032)..(1032): a, c, g, or t
  modified_base (1037)..(1037): a, c, g, or t
  modified_base (1045)..(1045): a, c, g, or t
  modified_base (1049)..(1049): a, c, g, or t
  modified_base (1055)..(1055): a, c, g, or t
  modified_base (1065)..(1065): a, c, g, or t
  modified_base (1083)..(1083): a, c, g, or t
  modified_base (1101)..(1101): a, c, g, or t
  modified_base (1119)..(1119): a, c, g, or t
  modified_base (1123)..(1123): a, c, g, or t
  modified_base (1164)..(1164): a, c, g, or t
  modified_base (1802)..(1802): a, c, g, or t
  modified_base (1945)..(1945): a, c, g, or t
  modified_base (2319)..(2319): a, c, g, or t
  modified_base (2322)..(2322): a, c, g, or t
  modified_base (2569)..(2569): a, c, g, or t
  modified_base (2608)..(2608): a, c, g, or t
  modified_base (3157)..(3157): a, c, g, or t
  modified_base (3489)..(3491): a, c, g, or t
agcnccgcagcggggaatntgcagtaggtctgccggcgatggagtggtgggctagctcgccgcttcggctctggctgctgttgttcctcctgccctcagcgcagggccgccagaaggagtcaggttcaaaatggaaagtatttattgaccaaattaacaggtctttggagaattacgaaccatgttcaagtcaaaactgcagctgctaccatggtgtcatagaagaggatctaactcctttccgaggaggcatctccaggaagatgatggcagaggtagtcagacggaagctagggacccactatcagatcactaagaacagactgtaccgggaaaatgactgcatgttcccctcaaggtgtagtggtgttgagcactttattttggaagtgatcgggcgtctccctgacatggagatggtgatcaatgtacgagattatcctcaggttcctaaatggatggagcctgccatcccagtcttctccttcagtaagacatcagagtaccatgatatcatgtatcctgcttggacattttgggaagggggacctgctgtttggccaatttatcctacaggtcttggacggtgggacctcttcagagaagatctggtaaggtcagcagcacagtggccatggaaaaagaaaaactctacagcatatttccgaggatcaaggacnagtccagaacgagatcctctcattcttntgtctcggaaaaacccaaaacttgttgatgcagaatacaccaaaaaccaggcctggaaatctatgaaagataccttaggaaagccagctgctaaggatgtccatcttgtggatcactgcaaatncaagtatctgnttaattttncgaggcgtagctgcaagtttcnggtttaaacacctcttcctgtgtggctnacttgtttnccatgttggtgatgaagtgnctagaattcttctatccacagctgaagccatgggttcactatatcccagtcaaaacagatctctncantgnccaanagctgtnncantttgtaaaagcaantgatnatgtagcncaanagattnctgaaagggnaagccagtttattagganccatttgcagatggatgncatcaccttgttactggnagancctcttgagtgaatactctaaattcctgtcttataatgtancgagaaggaaaggttatgatcaaattattcccaaaatgttgaaaactgaactatagtagtcatcataggaccatagtcctctttgtggcaacagatctcagatatcctacggtgagaagcttaccataagcttggcacctataccttgaatatctgctatcaagccaaatacctggttttccttatcatgctgcacccagagcaactcttgagaaagatttaaaatgtgtctaatacactgatatgaagcagttcaactttttggatgaataaggaccagaaatcgtgagatgtggattttgaacccaactctacctttcattttcttaagaccaatcacagcttgtgcctcagatcatccacctgtgtgagtccatcactgtgaaattgactgtgtccatgtgatgatgccctttgtcccattatttggagcagaaaattcgtcatttggaagtagtacaactcattgctggaattgtgaaattattcaaggcgtgatctctgtcactttattttaatgtaggaaaccctatggggtttatgaaaaatacttggggatcattctctgaatggtctaaggaagcggtagccatgccatgcaatgatgtaggagttctcttttgtaaaaccataaactntgttactcaggaggtttctataatgccacatagaaagaggccaattgcatgagtaattattgcaattggatttcaggttccctttttgtgccttcatgccctacttcttaatgcctctctaaagccaaaaaaaaaaaaaaaangacaaagcctcttaataaatttaatggaactatacatagaacagcagctcttcctcaccctttgcatacctttaatatttttccttcttaaattggccacagcaggggtcattcacactctcactgtcttgcaggaatcacaagaagtcttcatatgtgaacgtgccattcagttggtagttaagagcattcaacttcaaatatatagaagatatttgttttagtgcaaatccatgatggagtgcctcccttttccttttttcactttttgaaaaagatgttttgggtagtagtttaatatctcagggtgctctttctaacatagtaaaaaatgaagaaaaatgtttagattaaaactctgtagtctgatgacnttngaaccatccttgacccttaggcccaacctttccacagagaaatcacctctcttcctttgtcttttaagaactatttggtattaactagtttcagaattagtaaatgtgagattcagtcacataattatcagacattccatttgtcagaaatgtatttggctttttaaactcctttccacaaaagtttaagtctaatgaccttcttagagaagttgagcatgcctggcaagatcatttcatggaatangcagatgtttaaagttggatttttttttttttttttttngagtactagcaatgcacagggaccgtgttcttaggttcttagtctgtgaatctagcaataggcagtccagatttctgagtcgtactatggttttgccttgtcactgtgaggccctactaggtgtaagcattctctctgaattttaatttcctctcattaaaataggaacaaaatttgctatcctttagattaggagctgaagattcatttccctgggaatgtttcccatttagcttcaagtttcagctcaaacatcaccttctttctgactcctttcattcattcctccaggcagtaaggggctaccatagtactttgtttatgcctgtattatatgacatcactgtagttgcttgactgtttctcctactgttctgtaaacttattaatgggtgagaatctaattttactcatcttgatggcttcatgatccagcacagtgcctcacacaaagaactattgggtgggtggatggatggatggaggaatggagacagttggcttaaccagatcctatatacagattattactggctccaaaggatgagnagataagaccataagaattggatcaatgtaaatcctcacctgccctttgaagagccaataagggcatctttgtctttaaatacagcaaatgttattcagattttgtacttgtctatctgtttacctcagtgtagatgatatgaggatggtataactatgtaaattgtttttgaaaataatttgtttccccacaacttttgaaggttttatttgttgttgttattactagttcagtcccaaacttaccctttccttttcagagagctaatggccatgcttttcttcaaggaaagaataatttatttgaatgaagtgggatacttgcataacannnaaaaaaaaaaaaaaaaaaaaaaaaaaaaaaaaa

SEQ ID NO: 232 - DNA, 336 bp, Homo sapiens
gccactgcgaggccgttttagaaaactgtttaaaacaaagagcaattgatggataaatcaggaatagattctcttgaccatgtgacatctgatgctgtggaacttgcaaatcgaagtgataactcttctgatagcagcttatttaaaactcagtgtatcccttactcacctaaaggggagaaaagaaaccccattcgaaaatttgttcgtacacctgaaagtgttcacgcaagtgattcatcaagtgactcatcttttgaaccaataccattgactataaaagctatttttgaaagattcaagaacagcaaaaaaaaaaaaaaaaaaaaaaaaaaa

SEQ ID NO: 233 - DNA, 2254 bp, Homo sapiens; identical to SEQ ID NO: 55
  modified_base (268)..(269): a, c, g, or t
  modified_base (382)..(382): a, c, g, or t
  modified_base (873)..(873): a, c, g, or t
  modified_base (890)..(891): a, c, g, or t
  modified_base (1376)..(1376): a, c, g, or t
  modified_base (1383)..(1383): a, c, g, or t
  modified_base (1385)..(1386): a, c, g, or t
  modified_base (1388)..(1389): a, c, g, or t
  modified_base (1504)..(1504): a, c, g, or t
  modified_base (1766)..(1766): a, c, g, or t
  modified_base (1789)..(1789): a, c, g, or t
  modified_base (1794)..(1794): a, c, g, or t
  modified_base (1796)..(1796): a, c, g, or t
  modified_base (1798)..(1798): a, c, g, or t
  modified_base (1995)..(1995): a, c, g, or t

SEQ ID NO: 234 - DNA, 2254 bp, Homo sapiens; identical to SEQ ID NO: 55
  modified_base (268)..(269): a, c, g, or t
  modified_base (382)..(382): a, c, g, or t
  modified_base (873)..(873): a, c, g, or t
  modified_base (890)..(891): a, c, g, or t
  modified_base (1376)..(1376): a, c, g, or t
  modified_base (1383)..(1383): a, c, g, or t
  modified_base (1385)..(1386): a, c, g, or t
  modified_base (1388)..(1389): a, c, g, or t
  modified_base (1504)..(1504): a, c, g, or t
  modified_base (1766)..(1766): a, c, g, or t
  modified_base (1789)..(1789): a, c, g, or t
  modified_base (1794)..(1794): a, c, g, or t
  modified_base (1796)..(1796): a, c, g, or t
  modified_base (1798)..(1798): a, c, g, or t
  modified_base (1995)..(1995): a, c, g, or t

SEQ ID NO: 235 - DNA, 2073 bp, Homo sapiens
atcctaatttctaaagcaatcaggagagaaagcttttagaatggcacatcatatctcattgatgccaacatggttttttccatggttctgactttctgtgaaggcaccagcttgcaatatgccatcccgtttcaccttgcatgtgagacagcaaacaaaatccacaaatggtgtgaactaatatgctggctgctaccttgcataaattaatgatttgatcacacgggttcttcgtggggttacatctgtgaatagcctgttttccacatgtaaatttgtgccttacaccttgagttgtgtacacttgtaaactctttatgatcaactgttcccccttttgaaataagtgcagatatttatttaaccctcccttccccaccctctgccccacttccagccctctgaaagattggagtcaagcagatggaagaatgcagtggtgatagttgtcatgcgacagctggagaacgctgggcagcaccacaccctccaattcacactgccttctagttgtgccaactggaaccaccctttggctgtgctgcgaaatggaccccagtgttgttgtgggtgtgtcaaatcccctttcatcctcaagagctccctgcttcccttagattatttcaatacggtgatatccttatttgctagcagaaaagggactaacgtccccattcctcttttctgctgcgtcccactggctcagagaagcaaggcggtgcgcggttgggcagaaacctgggaggagtctccaagcccaattcacagcacacaacggcagtgcacacaaagaaatgacatggaaatagatgcaggcaggctggtccctgctgtgattaacgagaactccaagtacaaggccgaccacaatggatgctgcaaaaacgttgactggggcaaaggattttttattttattttttattttgttaattatgtttttaggggatgggaggtggtgtgtgtttttctcctcttggttttcatttgctcaagcacacaaaagggacttttgtttactctatcatgaacaaaggaactgtccacatactgtaaaccatgagcagtgttgttgttgtttttttaaacagtatatttggtggtctctttgtctgcttttatttccagttcgatcttctgggtttagttttgtctttaaaaagaattcaaaaaaagactgacaatgacagttttgagttggatagtgaaaaagtggagcctccataatcagtgtggttgccttcagacctgagtacttagctgagggtgggtgagagccctttgttccaaaagtccattagttttgctgttgtttaggagtaggtggttgttgttgtttttactttttttttttttggcttttgtaatggaatccatgttcacatcctgtgaactctgtctcctgaaaccctgaagtatttcctagaacctgaaatattgttttcttccttgaattttctctagaaatgcagaaattaggaaggtgatgggtctgtatccccctgcccccttctttcccatgcttgactcccgagagtactggcagtgcagcacccatcattgacgtaagcggctgtcttgtccagtgtttgtagagcatcactgcctcagctgttaaggagacctgtgtcaaaacttacatccacattcctacacccccacaacccatcacttctggtgttaaccctaaaatacccacatgtattgagctggtcttctgcatttaagtatttctccccagtttttttccccactgtgtgtggggggagggtccataaacccgagtgtgcctttgctttccacccttgctagacactggtagatgcaacaaactcagatttatatttgttgtaaagttgtaaaaatattgtgatgtcaccaattttccttccatctccacatcccctaacatctgattcacgacttaatgtatgttgtaagaaaagaaaaaagaaaagaaaaaaagggaaaaaagaaaagcaaggaaaaggctctttattacttaaaagtaataaaacctgactgttctatattaaaaaaaaaaaaaaaaaaaaaaaaaaaaaaaaaaaaaaaa

SEQ ID NO: 236 - DNA, 1114 bp, Homo sapiens
ctgaagcttcaagatggctgaccaggaccctgcgggcatcagccccctccagcaaatggtggcctcaggcaccggggctgtggttacctctctcttcatgacacccctggacgtggtgaaggttcgcctgcagtctcagcggccctccatggccagcgagctgatgccttcctccagactgtggagcctctcctataccaaattgccctcctctctccaatccacagggaagtgcctcctgtattgcaatggtgtcctggagcctctgtacctgtgcccaaatggtgcccgctgtgccacctggtttcaagaccctacccgcttcactggcaccatggatgccttcgtgaagatcgtgaggcacgagggcaccaggaccctctggagcggcctccccgccaccctggtgatgactgtgccagctaccgccatctacttcactgcctatgaccaactgaaggccttcctgtgtggtcgagccctgacctctgacctctacgcacccatggtggctggcgcgctggcccgcctgggcaccgtgactgtgatcagccccctggagcttatgcggacaaagctgcaggctcagcatgtgtcgtaccgggagctgggtgcctgtgttcgaactgcagtggctcagggtggctggcgctcactgtggctgggctggggccccactgcccttcgagatgtgcccttctcagccctgtactggttcaactatgagctggtgaagagctggctcaatgggctcaggccgaaggaccagacttctgtgggcatgagctttgtggctggtggcatctcagggacggtggctgcagtgctgactctaccctttgacgtggtaaagacccaacgccaggtcgctctgggagcgatggaggctgtgagagtgaaccccctgcatgtggactccacctggctgctgctgcggaggatccgggccgagtcgggcaccaagggactctttgcaggcttccttcctcggatcatcaaggctgccccctcctgtgccatcatgatcagcacctatgagttcggcaaaagcttcttccagaggctgaaccaggaccggcttctgggcggctgaaaggggcaaggaggcaaggac

SEQ ID NO: 237 - DNA, 703 bp, Homo sapiens
tcacttcacttttattatgaacaaacacaatctcagattagtacaattagcttcagagttgatattaatagaaattattccaaaattattcttgtcacaagtaactactatatcccacataaaaagggaaaaaatcccacccaatcacagaaaaggcatcctctgtatgtttccgtggcaatgcgttgtttatgtattctcaaattttgtctggctagttatccaccgcttctccaatggattcattcagtttcttggagaaccatatagactaatgacagcatctgggacacacggacgtatcaagttcatggtggacattcctattataaaaaatactcaggtcttgagaattcctgtgctgaaggatcccaaaatgctttctaaaaagcattagtcatgcctcaaaactgccctttgaggtaggtcagtattattatccccattttaacagaaggaaaactgaggcaccttatagttaagtgacttgcccagggtcacacagcaagtcagtggcacagtggttggagaggccctggccttaaccaccagcataacatggccacctcgcttttttaacctttcatgatgacctatttgagctacacttacagagaatacacccaagatactagcaaaccaaggagaaaattttccattttaaatgctacaaccatcttttaacccaaaaaaaaaaaaaaaa

SEQ ID NO: 238 - DNA, 1030 bp, Homo sapiens
ttttcttgagttacctcccgcagccgcagccgccgtgctcagcgcgagccccggagcccttgagcgcgaggcgcggagcccccggagcccccaaaccgcagacacatccccgcgccccagagccccggcctgcgcgcccagccgggcccgcgcgatgccctcagaccggcctttcaagcagcggcggagcttcgccgaccgctgtaaggaggtacagcagatccgcgaccagcaccccagcaaaatcccggtgatcatcgagcgctacaagggtgagaagcagctgcccgtcctggacaagaccaagtttttggtcccggaccatgtcaacatgagcgagttggtcaagatcatccggcgccgcctgcagctgaaccccacgcaggccttcttcctgctggtgaaccagcacagcatggtgagtgtgtccacgcccatcgcggacatctacgagcaggagaaagacgaggacggcttcctctatatggtctacgcctcccaggaaaccttcggcttctgagccagcagtaggggggctcggcctgggagtcggggggccccggtcaggccctgcccagagagctcctggttcctgaactgagctgcctctaccgtggtgggctgggcaggcatgtgcccccctagtcagagggcaccaacccacctactctgcccctgggtggatcctgggccggtcgtgttagggttgtccctctgggtgctggctggtgggatgggggagggtggggagcagctcccagcacccctgctgtgtggttcatcttttttttaggcccctgcctgtctgcccatctgcccctcacccacccgaggctctgcccaccgcctggacctgcccacccctgaaagactggcccctggctccccgcccctcggtctccacgtggtgtatggatctgtggtcattgtccctctgcagaataaagattgctcaggcctgcctggcaaaaaaaaaaaaaaaaaaaaaaaaaaaaaaaaaaaaaaaaaaaaaaaaaaaaaaaaaaaaaaa

SEQ ID NO: 239 - DNA, 3105 bp, Homo sapiens
  modified_base (6)..(14): a, c, g, or t
  modified_base (47)..(47): a, c, g, or t
  modified_base (50)..(50): a, c, g, or t
  modified_base (681)..(682): a, c, g, or t
  modified_base (1730)..(1730): a, c, g, or t
  modified_base (1893)..(1893): a, c, g, or t
  modified_base (2047)..(2050): a, c, g, or t
  modified_base (2052)..(2057): a, c, g, or t
  modified_base (2059)..(2061): a, c, g, or t
  modified_base (2066)..(2068): a, c, g, or t
  modified_base (2070)..(2070): a, c, g, or t
  modified_base (2075)..(2077): a, c, g, or t
  modified_base (2080)..(2082): a, c, g, or t
  modified_base (2086)..(2089): a, c, g, or t
  modified_base (2092)..(2093): a, c, g, or t
  modified_base (2095)..(2097): a, c, g, or t
  modified_base (2099)..(2100): a, c, g, or t
  modified_base (2688)..(2688): a, c, g, or t
  modified_base (2706)..(2706): a, c, g, or t
  modified_base (2714)..(2714): a, c, g, or t
  modified_base (2726)..(2726): a, c, g, or t
  modified_base (2770)..(2770): a, c, g, or t
  modified_base (2797)..(2797): a, c, g, or t
tttttnnnnnnnnnttttttttttttttttttttttttttttttttnttnttttttcttcattaaccctttattacaagtcacgctcttatagaagtatatgtggacttacgtgaaaaaatcaaatgtatccaagaataaaaaacacagcacataaagtagtatatgcattccagtgttcgcgccagagacggcgggcgcccaagtaaaagctcttctaaaacggcctgactggggcaggccgggtgcgaacggttccgggcctcaggcacagtgtgggggccgcctgcctcctccgcggcccggcgggcgggggcagcaccagctcctagggcctccgggccagcggcggaccccaggccggcccaagcccgacgccaggcagaaccctttgggcggggccgtatctggccctccggggacggcagtgacgacacccccagaaatgtgggcttcagggctggccacagggtaccctcagaagcccgcagcttagtcggcctttttcaggaagatctcgctcagaatcacccacacaggggagtccgtctggatcgagaggcgcagtgcttccagagggccgaaggctgggtccacctctccctctgccactcccttgtagaaggagccgatctggaggtagccgtcggggctccgagggtaccggagggtggcggtgcgnngccctcctgcagggcctccttgtctgactgagggttgtcgaagggcagcacctccacagacgtgttgaagagcttgtcctccgggtgctcgatgttcccactgcggaagaagaaccgctccagtcttagaggttggaagaagcggaagcggatgaagtcccccgcggcaggggtgaaggcccagaagaagtcctcgcgcaggtaggctttctccagggtgaagtgctggtatgtcttcaggctcgtgctcacctctgctggcgggttcacatgctccttccgcagcgcctgctttccaaagtctttgtccttcagtttctggatcttgccagccagcgaggagtgagtgcccacgtgctggaagagggacggtttgaagcggatccgcaggttggctttctgccggtcacagtgcttcgcatccttctcggggttgcagactttcacccacagaatatggtccaggagccagtcgatgggcttgtcccggtagaacatgagaatgaactctacaatcaggctcaggtccagcgacttgaacatcttaccaatgaagcccagctgggagaactccaggatcatccagtcctctgaaggctgctgcagtgcaaagttcttcatggtgctcaggtagttgggcttggccacgatgtcatcctccagctgcacgtagtagatgcctttggactgcgcgtacatcatgaggaagcagtaatcgaggttctgtttggtcctccacctgactctctccttggggtccccaaaggactctcggaggcgggagaagtcagggtagaagtggggggagggtgagatgacctccaggagcccagaatggatctccgtggggaacaaggccttgatgttctctgtcactgccgaagtgtactgtgagtcagtctcggcgatcagcaccacgatgaccgagtcctccttctcctgcgggctcagctcggagatgagcgagtgcagagtgtcagtcaggtacgagtgcacctcgcgccgcacgctcgggatgcccatcaccaccgacactccggtgcggccntggcccacgcgcaccgcgggctgcagactgctctccttggccagcaggtgtggcaggtgatggaagacggtgggcaggtgcagcacgtgccggtgtgagccgttccacggcttcaatcgggggtcctctgttaggcggccccaggtgcgattgccgtctccgntctcgcagcgcctgcctttctgacacggccctcttgatctcgtccagcaccaggttgagctccttggagcgcttgaggctctcctgctcagctgcgtgcaaccgatcgcgcagcgccaggaactcccgctggtaaacgtccacaacgtcgcctnnnngnnnnnngnnngccgnnncnagggnnnggnnnagannnnccnnannngnncctccagtgtgccagcgcacacatctgggtgtccacctctgcaatagctcattgacatctgttcttgtgcctgccacacgtgacatagctggggtcactctaaaattacactgacactaatgctcatggggagaaaaccaggggaattagccctcttccagtactctcccccaccgggggttattttatcctctgagaaggcatctgaagtggaaatacgatttccagacctaggtaggtggatcctaagcaagggctggaacagcctcagactgaatccgctccatccgttggcctccaaagcccactcttgctttttgcagcacacgctccctccagcgggtgggctacccaaggtcctggtgctagctcttcactgtccttgtagcggtcgctggttgctcaccctgcactggattcttagcctcacgatggccccggggggtggctgctgcagttccaggagcccacctcacttcattgctcaggtgagcaaatgaggttgagaaaccggccctggggctgctcaaggacagtcaacagcagcgaggggactagctctgaacgccctggtgcctgtgtctctgnagacctgtgctgcgcctngggcaccntgaagggtccgncatgccaccccagggggcccctgtcagaacctccagctgggccnaggcatgagggctgtaggtggatgggncagcacagaggtggggctgcccgacagtagagaggcaccaccagtctggcagggaccagtgagcaagaatgagatcaacaacctcctggtggctcggtgcccacagtccacgcagcaggacgctccaggcctctgccaggcgagtctctgaaaacctatgtggcctacaaggccttctgtttccaagtctccaagtttaagaagcctgaccgaactccctctacactcaggcagctcttccattccttgatccttggtggcttcacagaccccagagttgcgtgggatggcctcaccccaccagcagc

SEQ ID NO: 240 - DNA, 2596 bp, Homo sapiens
  modified_base (198)..(198): a, c, g, or t
  modified_base (411)..(412): a, c, g, or t
  modified_base (620)..(620): a, c, g, or t
  modified_base (1003)..(1003): a, c, g, or t
  modified_base (1211)..(1211): a, c, g, or t
  modified_base (1488)..(1490): a, c, g, or t
  modified_base (1496)..(1496): a, c, g, or t
  modified_base (2077)..(2077): a, c, g, or t
tttttttttttttttttttttttttttttttttgctgataagaattcttttatgttattccaataaaaaatacattcatacagaaatataacaatcttgcaaaaaacaatttcaaataaaatcttgtaaaacaaaattttacaaaaatcttacaaagattctttagataacagggtgcttccaaaaaaaaaaaaaaangaaatttcactaatagaaatttttttttaatttcaagcaaaaagtttctgcttgattgaggctcagttatcacctgaacagaatgtacttctttatgtacgtgctaattatgaaaatcacaggcattgacaggtacggtacccagccccacccaggcaaacagctccgacatgtttcgtaagtgagacaagccagtgcaagtttttttttttnntttttttttttttgtcttttgcttaccttcttgcttaatggaattgttatggctaagcacatagaaggccaaaaaaggagttttccaaacccagcaaatcaagtgcttggattctgaactgccaaaagaaaactgcacttcccctcttaagtaaaacgaaatgagtttcttaggtaaatgtattcatcagcccagataaaaaaaaaanccagttatgtgagcgttagtcactgctcatttccaggaagatcaaacaaaataccagcccagccagactcacatgtgtgtatatatatataaagcaaagagccacacccacaagccagcagctgggtgaaatatcagctgtccacgccgtggtatgccaattcggggaaattactccttggaaaaactggaagaatctacttgctggaaaaaatagcttcatctgcataaaaagtgttctacaaaagaatccctgtggttagcttactcttaggttagatcttctaataaggctgaaattcaaaatcaaaaccttagtgtgtccgagtccagcctgggttccagcattctgttcaggccacttctgaacggccgaaggtgccncattccagacctgcccatttgatggacagagcagacagcccggaacagattcaagcaagaaagtcctccgcacatcgttaaattaaagataaagcctctataaaagttaggttatggttttcatttttacctcctttatggccattttgaaatatttcttcacaggctgtggaattttctagctaaacattctagtttctccttaaanaaaatatttatatattatctatatatataatatatatatatacacacatacacatactgtacacacaaatatacatacacaagaattctgcccacttttttaaaaaagtagtatactttctgtattaccaacagatagctagacagatatgtgaaacttgtgccttttaagcaaatacattaacattgggggttttttaatacttctgtatctttaatatgtgtgaaaatgttacatattaaatacagccggtgtgtgatctatacaattgttgtgnnnggtctnatatgaaagtctcaaggtggcagaattggtcagatttttccattttcctgttttccattttaacactgacagtcaagttgcctaaagtgttgaacaaatactgacatgtaaagggagtttcactctatgtctttgtgaaggaggaccttaaagagattttttttctgtattatacgttgatacagtacactgccaggtgaaacaagagccttaataaagcatgcatcgcccacacccctgtatgagacccccacagaagggatcgcttgcgtaaggcaccattatgaaggtcaacagtgcattaacagctagaaaaccagaaattagtcctcaaggcataaataagagaaacatagctgcatgagaaaacagtttctaagcgttagtggttttatccacccaactgagaaaaattttaggttcttaagtctaatgaaacattagaccagcaattcccagccccagctttgtgacactcaatacgtgtccaatttcttctaagggcatcacagaattctccaaaaagttaattcaaattcagaatcatttaaaaataatcctgtgttgcacaatgcctttcnggaaggggagtgttacaaacttggaggggaaaaaaaattgtatattgccaggcccggatggctagggggtcactgtattagacagattggatcttagctgctcattaactggaatcagtattgcagtcctgacttaaaaatggaaaagcatatagttccccagaccatgcatgactttttgtattctaaggaaaagttaaattgttgtgttatatttgtaaatacacagcttatacaatgggttacaaatgagctatgttgtagcgtgtaaaacaagctacttgacacattgcacatttaatagctgcaccagacactaagagttcctctcacacagaaaagggggagagaggctctccctccccacaccactcgccactctggggtcctgagttcccacgcccaccctccaagattttccttctttttttgtttttgtttttttgtttttttgatttttctttttttttctaaggtgcagacaccccctccccccaaggaaatgattggtggtcatct

SEQ ID NO: 241 - DNA, 3118 bp, Homo sapiens
  modified_base (2)..(2): a, c, g, or t
  modified_base (123)..(123): a, c, g, or t
  modified_base (125)..(125): a, c, g, or t
  modified_base (2404)..(2404): a, c, g, or t
  modified_base (3084)..(3084): a, c, g, or t
  modified_base (3106)..(3109): a, c, g, or t
cngaggcagagtgctagcgggagcgcgagccagcaagaggcgcctgcgcgatgtccgggcccctgagcccgcggcgctgagccagccgggacggacatgcgcgggagggcgccgcggggcagncnccgctcctccgggggaatgaaagctactggttgattttaaagtgcctgggcctcacaggtttggagatgtcccagaataaggcacaatgtcaatagcaggagttgctgctcaggagatcagagtcccattaaaaactggatttctacataatggccgagccatggggaatatgaggaagacctactggagcagtcgcagtgagtttaaaaacaactttttaaatattgacccgataaccatggcctacagtctgaactcttctgctcaggagcgcctaataccacttgggcatgcttccaaatctgctccgatgaatggccactgctttgcagaaaatggtccatctcaaaagtccagcttgccccctcttcttattcccccaagtgaaaacttgggaccacatgaagaggatcaagttgtatgtggttttaagaaactcacagtgaatggggtttgtgcttccacccctccactgacacccataaaaaactccccttcccttttcccctgtgcccctctttgtgaacggggttctaggcctcttccaccgttgccaatctctgaagccctctctctggatgacacagactgtgaggtggaattcctaactagctcagatacagacttccttttagaagactctacactttctgatttcaaatatgatgttcctggcaggcgaagcttccgtgggtgtggacaaatcaactatgcatattttgataccccagctgtttctgcagcagatctcagctatgtgtctgaccaaaatggaggtgtcccagatccaaatcctcctccacctcagacccaccgaagattaagaaggtctcattcgggaccagctggctcctttaacaagccagccataaggatatccaactgttgtatacacagagcttctcctaactccgatgaagacaaacctgaggttccccccagagttcccatacctcctagaccagtaaagccagattatagaagatggtcagcagaagttacttcgagcacctatagtgatgaagacaggcctcccaaagtaccgccaagagaacctttgtcaccgagtaactcgcgcacaccgagtcccaaaagccttccgtcttacctcaatggggtcatgcccccgacacagagctttgcccctgatcccaagtatgtcagcagcaaagcactgcaaagacagaacagcgaaggatctgccagtaaggttccttgcattctgcccattattgaaaatgggaagaaggttagttcaacacattattacctactacctgaacgaccaccatacctggacaaatatgaaaaattttttagggaagcagaagaaacaaatggaggcgcccaaatccagccattacctgctgactgcggtatatcttcagccacagaaaagccagactcaaaaacaaaaatggatctgggtggccacgtgaagcgtaaacatttatcctatgtggtttctccttagaccttggggtcatggttcagcagaggttacataggagcaaatggttctcaattttccagtttgattgaagtgcagagaaaaatcccttagattgcaaaataaaatagttgaactctctgtcttcatgtggaaggtttagagcagttgtgagatgctgttatgctgagaaaccctgactttgttagtgttggaaaaaagtcttacaagtctataatttaaagatgtgatggtggggaggggaggatggggaagctttttatatatgcatacattacatacctatatataaacttgtggtataaccatagaccatagctgcaggttaaccaattagttactatcgtagagtaatatatattcagaataataaactcaagctggagaaatgagtcctgatagactgaaaattgagcaaatggaagaagatacagtattgtttagatcagaatcattaaaaaatatttttgtttagtaagtttgaagatttctggcttttaggccttttctattttgttccatttatttttgcaggcaatcttttccatggagggcagggtatccattctttaccatgggtgtacctgcttaggttaaaaatcataccaaggcctcatacttccaggtttcatgttgcgtcttgttgagggagggagagcaggttacttggcaaccatattgtcacctgtacctgtcacacatcttgaaaaataaaacgataatagaactagtgactaattttcccttacagttcctgcttggtcccacccactgaagtagctcatcgtagtgcgggccgtattagangcagtggggtacgttagactcagatggaaaagtattctaggtgccagtgttaggatgtcagttttacaaaataatgaagcaattagctatgtgattgagagttattgtttggggatgtgtgttgtggttttgctttttttttttagactgtattaataaacatacaacacaagctggccttgtgttgctggttcctattcagtatttcctggggattgtttgctttttaagtaaaacacttctgacccatagctcagtatgtctgaattccagaggtcacatcagcatctttctgctttgaaaactctcacagctgtggctgcttcacttagatgcagtgagacacatagttggtgttccgattttcacatccttccatgtatttatcttgaagagataagcacagaagagaaggtgctcactaacagaggtacattactgcaatgttctcttaacagttaaacaagctgtttacagtttaaactgctgaatattatttgagctatttaaagcttattatattttagtatgaactaaatgaaggttaaaacatgcttaagaaaaatgcactgatttctgcattatgtgtacagtattggacaaaggattttattcattttgttgcattattttgaatattgtcttttcattttaataaagttataatacttatttatganaaaaaaaaaaaaaaaaaaaaannnnaaaaaaaaa

SEQ ID NO: 242 - DNA, 2644 bp, Homo sapiens
  modified_base (8)..(8): a, c, g, or t
  modified_base (38)..(38): a, c, g, or t
  modified_base (45)..(45): a, c, g, or t
  modified_base (50)..(50): a, c, g, or t
  modified_base (89)..(89): a, c, g, or t
  modified_base (109)..(109): a, c, g, or t
  modified_base (254)..(254): a, c, g, or t
  modified_base (734)..(739): a, c, g, or t
  modified_base (1938)..(1938): a, c, g, or t
  modified_base (1956)..(1956): a, c, g, or t
  modified_base (2061)..(2061): a, c, g, or t
  modified_base (2066)..(2066): a, c, g, or t
  modified_base (2071)..(2071): a, c, g, or t
  modified_base (2103)..(2103): a, c, g, or t
  modified_base (2109)..(2109): a, c, g, or t
  modified_base (2156)..(2156): a, c, g, or t
aacggagngagccaatgagtgcgagatgttgagtgacnagcgtgntccanatggaggccctccgtgctagtacggcttgcggcttaagngccgccgcggtctgcggaangtcaactattcaacatggaggcggaggtcgataagctggaactgatgttccagaaagctgagtctgatctggattacattcaatacaggctggaatatgaaatcaagactaatcatcctgattcagcaagtgagctgtcaccacngactaaagaagagaaaactgcggcagagcaattcaaatttcacatgccagatttatgaagaaatggacttggaaaggaaattctaacagagaagagcttaattccggagaaatttaggaagatgtcttgttaacccttgatgtctagagattgggggctggtgaagggggtttggcttcaatgactggataatgatatctttcatgagagagattataagaagaagggcagataatatatgaataaagttcagccaaaaggatcaaatgagaataaaacgatttaaatatatgtacacacgcatgcacacacacacttagtcttgtaatttcaggccagaaattctcaacactattttgcatctgttttctttttctaagtcatgataatatagatgttctggtctatcataaaagaatgtttatgtacatttcagtcattcggtatgtggctttgtaaattaaagtataggcaaaacannnnnnttatacatgatatataatttcattttgtaaatgttgattgcacatgtggtcacattattgttgagactgcttttatgtgacctgtagtctcccacagaacctaaagtaataagctggcttttctgtgatagccacgtttgcgtatttctttccctatttcccttgcctgctaatgttgaacagcatgaacttgctttctgatgctgttttagactgtccctgttgtatctcaataatatctttgttttccttcagcctttattactataattgttcattctacatgaaagctaggaaactgaaattagaagagcacttatctgctacttgccagttttgcgtgagtgtgttatatgtatgtgtcaatttccctttaaaataactatttattttaaaataactattggcaataaggaaactgttcaaagtagaggcagatcttgatagaaagatgttaatcacagggttgtttataatagcaatatacatacacatttggctagtactaggtgaataggaaaataaatcatgctgtatgtatacaataagaggtcaagttgccaataaattattactgttaatgttctgggaaatgctgaaactatgctaagtgggggagagggaaagcaggtattgcagttttgtagtgaagattgggctttggagtcatatctgagatgtaagtagcagcttttaaattctagctatgaccctgtgcagatcacttaacttttgagtgtcaggatgtttggaaggacaagacaggaaagtgttttaatacagggttcagtatttagtaagccttcaataagtgatattacatacatgtaataaaaactaagcattgaaaggactaggaaaaatgcatcaaatgttagttctgcaggttatagaattatacttttatgtaattttaaaatttcagttatgaacatgtttgtccattaacaaacttataatagctgaaaaacagggttgtgagaacagcttcagttaaaattgtcctgtctagtttgaatatttcaagaacagaaagccttttttttttttttttttttttttgagacggagtctcactctgttgcccaggctggaatgcagtggtacgctctcagctcactgcaacctccacctcccaggttcaagcagttctctgccccaccctcccgagtagctgggattacaggcgcccgccaccncgcccggctatttttttntatttttagtagagatggggcttcaccatcttgaccaggctggtctttaactcctgatggtgatccacccacctcggcctcccaaagtgctgggattacaggcangagcnaccgngcctggcccccttttttttaattacagagaantaagtnacaccttagtatcagatattaattttcttcagtgttcaggcaattantatttagaaagctcttgtcatgagatggctctgggatgtgatgatgattgttgggattgaaaaaatggtagtatcatggagagatcataataaattcttagtattaaaagtggttttgctttcagttagggagaaaaattagattgtactatttttcctctatgatttccttcagttatcttccaaatgttgttttttccccacagcccccttaacattgttctctatgcacttctcaatacattttcatttgtttctcaagcctctttgtggatgactcctaaatataacttcttccactagctctagatccgtatttccaataaaatcccctacctgaatattcaagttaaacatgtccagaatacttactgattttattgttaatagccactattctgttgtctggaattaaaacctgtataactaatttgcatccctttatcttcttagtcaataaaacctacaatcctctttctaaaaaaaaa

SEQ ID NO: 243 - DNA, 738 bp, Homo sapiens
  modified_base (18)..(18): a, c, g, or t
  modified_base (20)..(20): a, c, g, or t
  modified_base (25)..(25): a, c, g, or t
  modified_base (624)..(624): a, c, g, or t
  modified_base (641)..(641): a, c, g, or t
  modified_base (671)..(675): a, c, g, or t
  modified_base (693)..(693): a, c, g, or t
ggcagcgccttttacggngncgtanagcagctcggccgagcagactgctgcggttcctgggtggcggcggcatggaggcgcgcttcacgcgcgggaagtcggcgctgctggagcgcgcgctggcgcggccgcgcaccgaggtgagcctgagcgccttcgcactgctgttctccgagctggtacagcactgccagagccgcgtcttctccgtggccgagctgcagtcgcgcctggccgcgctgggccgccaggtgggcgcgcgcgtgctggatgcgctggtggcgcgcgaaaagggtgcccggcgtgagaccaaggtgctaggcgcgttgctcttcgtcaagggcgccgtgtggaaggcgctcttcggcaaggaggcggacaagctggagcaggccaacgatgacgcgcgcaccttctacatcatcgagcgcgagccgctcatcaacacctacatctccgtgcccaaggagaacagcacgctcaactgcgccagcttcacggcgggcatcgtggaggcggtgctcacacacagcggcttccctgccaaggtcacggcgcactggcacaagggcaccacgctcatgatcaagttcgaggaggcagtcatcgctcgagaccgggccntggagggccgctgaccntgccggagataaaggatacagagagccccnnnnnaaaaaaaaaaaaaaaaanaaaaaaaaaaaaaaaacaaaaaacaaaaaaaaaaaaaaaaaaaag

SEQ ID NO: 244 - DNA, 1128 bp, Homo sapiens
  modified_base (26)..(26): a, c, g, or t
  modified_base (28)..(28): a, c, g, or t
  modified_base (269)..(269): a, c, g, or t
  modified_base (592)..(592): a, c, g, or t
  modified_base (902)..(902): a, c, g, or t
  modified_base (971)..(971): a, c, g, or t
  modified_base (1009)..(1009): a, c, g, or t
  modified_base (1040)..(1055): a, c, g, or t
  modified_base (1057)..(1059): a, c, g, or t
  modified_base (1061)..(1061): a, c, g, or t
  modified_base (1063)..(1063): a, c, g, or t
  modified_base (1065)..(1065): a, c, g, or t
  modified_base (1069)..(1069): a, c, g, or t
tttttttttttttttttttttttttntnttcaaaacagtttattttattttatttttttttttgtcagacaaacacattgatttctggaccacagtagaggatggaaacctttcacaaacttatttatttgaaaatacaaatataaaattatactttccacatctgtgatgtgagagactgccatccacatagtaattttttacaacagggctttaagaaagccacacacaaagacctgaaagatgcttgagatatatatatagatagntacatatatatgtatatatataaaaaaaatactcactaccaaagttctcatcagtttcatactaaagtataaaagtaagggtgaggtcagccacagtgctagggaaagttttatttagatacatttatgtccacatgaaacgcttagacttgcatcctattacatatggaattcggagtttacaatacaccatgaacggcagattggctagcccacgctacttaagaggacactcacagattccacatgggatggtacattatgtacagaatacagtagtagagaaccttcgagggaggctctggaacttttgtctctcagcntccggccccctcccccatcatgcccctgcctcccggaactgaaatcctgtctgagacaatacattctgattatttgatagccaggtgtttggattaaggttgcccccctgcaggtccccgacaagagggatggattttatttatatgtttttgtgttttagtttacttacttttttttggtagaaaaaaaagaaagaaaaagaaaacaaacatattacagtattaaagtattgcttaacttccagcgtctccttgtgtagtgtctgtgcccaggacggggctgagctgacgtctgctagttttctgcttnggggtgagggtggggaaacccgccagtgtctttcttcaatgtgcttgcctgcagtcagtccctctgctntcccactgtctgccttccttggaagatagcctggcttncgaagcacattcaagaaaaaaaaaaaaaaannnnnnnnnnnnnnnncnnncncncnctcnccctctgttcctgcgtgccacttgcaaccaataaagagaagtatgagttagtgtttctt

SEQ ID NO: 245 - DNA, 2758 bp, Homo sapiens
  modified_base (74)..(75): a, c, g, or t
  modified_base (79)..(80): a, c, g, or t
  modified_base (82)..(87): a, c, g, or t
  modified_base (90)..(92): a, c, g, or t
  modified_base (95)..(95): a, c, g, or t
  modified_base (99)..(99): a, c, g, or t
  modified_base (109)..(111): a, c, g, or t
  modified_base (803)..(803): a, c, g, or t
  modified_base (944)..(950): a, c, g, or t
  modified_base (952)..(952): a, c, g, or t
  modified_base (996)..(996): a, c, g, or t
  modified_base (1329)..(1329): a, c, g, or t
  modified_base (1392)..(1392): a, c, g, or t
  modified_base (1399)..(1399): a, c, g, or t
  modified_base (1411)..(1411): a, c, g, or t
  modified_base (1430)..(1430): a, c, g, or t
  modified_base (1627)..(1627): a, c, g, or t
  modified_base (1732)..(1732): a, c, g, or t
  modified_base (1876)..(1876): a, c, g, or t
  modified_base (2065)..(2065): a, c, g, or t
  modified_base (2255)..(2255): a, c, g, or t
  modified_base (2261)..(2262): a, c, g, or t
  modified_base (2264)..(2264): a, c, g, or t
  modified_base (2342)..(2342): a, c, g, or t
ccgagttttttttttttttttttgggaaaccataaagggtcgggcactttagttttggttcacatgaatagcanntttnntnnnnnnttnnnttntttntttttttttnnntttaactgatatattttttatttattaatgtaggctaaacaagcagaagccatcagtaagagacaagaggaaagaaacaaagcatttattccacctaaggaaaaaccaattgtgaaacctaaggaaggtaatgctttctatgatgtaaaagtctttattaattaggaaaagtaaacccataataaatttgtctgaatctttttaagaaacagttgtatcttttcatcagttctcttagcatttcattaattactaatcctaaggacaagggatggctgagataatttataatttagaggcagctaatgcctatttcagtgcaaactggattgacagtcctctcctgacctctggtctgtgcttggaaaagactctttgttgtgaaagatacaaacccagggcagccagtgcatcttctgtagaaatgcaagaagatccctgagctctgctgtcatgcctctcaaagaggaattatcagaagttgtactttttcttctctttatgtgatcttggcttagagtttggcttctatatcggtaacatggatttctcatcaccttagactaaaggatgctgacaggtcttattcaggagctattagtgcgaaagtgattgtggtttttaaatggcagaaatcactttcgcactaacctagtatttaaaagacactaagagaaaacattgtcatgccnatttcttctgatgcatcctcttctgcatttttttcccctgtggtaacacttatcctcttcctaaagtaaccctccaaagtgaacagtgacacactgaagggagagggctcaccagcaatattgtacatagactgggtcagnnnnnnntntaatacattattattttaatatattgcttgttaatagctttaanaatactacattctatggtagattattggttatataaaaggtagaaatgtcataagtattataatttccagtctgtaaaacctgtcagttgagtgctttgaaggtactcaatatactcaatagctagttaccctaatttagtttctccacacggtggaggctttaacactctgtgcttctcaggttgctgggtagtttgatgttttatcttatgattcttttatgctgtgatcctgtactttgaatggtaagaaaaagttgcattctttttcactgcttcctttctctattttgttcacacttttggcattgattagatagttggcttctattnagggggacttccacacactctcaaattattgtctttattaccaaaatgttgttaaatataccnaaaatcntgttaaaatacntattaattagtcattcatngaattaatattcaatgaattaatctaacattaaatgaattcattgaatattcaattaatattgaattaatatttggaaaactttaaattttcgttttgatattagaggaagtagattttgacctctagcttagggttagctgattaaacttattgagaagggatacatgtaattttaaattattttaatgtgcaagntggaaaataatgactcagaagttccaaaatatggaaaagaatgtaggtaaaataatttagtctgaagtaggatttaaggaaatagtcttaatatagttgaatccngtaattggttcaattatgccatttatgccatttttatgtatacttgtactaatatataaagtattttatgatttgttttatcttaatctgaagaaatttctaactgctttaggcaagtgtttttatattttatactgtgatcanctttcaattattcaattataagaatactctgaagttaactgccttaaacatatattctttgttaaacatatattctttgttttacttggtaaaatctaaagtattacatgtgttgtgcttttaatttgtctagcttctactgaaactaaaattgatgtggccagcatcaaggaaaaggttaagaaagcnaagaataagaaactgggagctcttacagctgaagaaattgcacttaagatggaggcagatgaaaagaaaaagaagaaaaaaaagtaacatacccaaaactccttgactagaactatctccttttgtaaaggattttgagatatcaggcattagttgccttatttgtgagaaattttctgagggctttttntttttnngntggtggtggttgttcatagaagagtgttctttataaattatattattattgtattttttgaaaaatttatactagaangtggtatatatgtctttgtatacattacgaccattgtgattatccattaaatccagtgtctgatgctattggttagtaatgatgtcccagcatttgatgttccctctctaatgataacaagtaaatatttaggtttatcccttttgaaagtttggttttacttttaacatgtcatgaacagaaaattaaggcctgtaaaatcagatccactagctactcctctgttctgaatctggtgaagtagtaaaccaaaaagacagggaaaaccatatatttagagtcgaagcagcatgcaaaaaataataatgtttttaactaatgaaggctactggagttacttaagaaatcacccttaaaaaatggttgcttttactttgtttaaacccccccctttgcttcatatttggccaagggaa

SEQ ID NO: 246 - DNA, 732 bp, Homo sapiens
  modified_base (8)..(15): a, c, g, or t
  modified_base (35)..(39): a, c, g, or t
  modified_base (41)..(43): a, c, g, or t
  modified_base (81)..(81): a, c, g, or t
  modified_base (706)..(710): a, c, g, or t
  modified_base (712)..(715): a, c, g, or t
  modified_base (717)..(717): a, c, g, or t
  modified_base (719)..(726): a, c, g, or t
ctctacannnnnnnncttcagctgcattctaggannnnnannnactactgagctgcaaatctatgctaagcatataagacnatgactgaaagggaaaaaaatttttttaattacaaactcaattcatttggtgcatttcaaaggtgcaatacttttcttcatttatcagtgaaagaagttagaaattaacttcccaaaaaaatcagcaaatggcaaacaaatgtccttgaaagtcacagtcacatatagtgcgtcctagaaaagaggaggggcaagatgggctccacccactttcatgagtttcatcaaatactggatctactcaagggtggagagaaaaggcaactttcaaaaaggagtatgttattaaatgaggcatttactatactccttcctaagagcaccagatggggaacatgttttctaaactagatctaggaagtggaatgtggaatcaatccgtcctcctccccttaagggctaaccactggttaatgaattaaaaaaacaagactaaaaaacaaaccccacacacactcccccccaaaaaaaagaggagggaaaaaaacaaaacaaaacactaagatgtcccagattactctccagagtggaaccagggagcagcttcaacaattccaattagtctgttacagagtcatccacaagcatgccttgcttttaaacaacaaaaaaaaaaaaaaaaaannnnnannnnanannnnnnnnctctct

SEQ ID NO: 247 - DNA, 1258 bp, Homo sapiens
  modified_base (140)..(140): a, c, g, or t
  modified_base (142)..(142): a, c, g, or t
  modified_base (146)..(146): a, c, g, or t
  modified_base (404)..(404): a, c, g, or t
  modified_base (775)..(775): a, c, g, or t
  modified_base (1088)..(1088): a, c, g, or t
  modified_base (1163)..(1163): a, c, g, or t
aaggcgattaagttgggtaacgccagggttttcccattcccgacggttttaaacgccgggcaattaattgtaaaacggctccctatagggcgaattgggaaccgggccccccctcgaagtttttattttttttttaaatntntttnttttttttttttttttttttcttttaaaatggcttttattgagacacttgtagggattctgcaacatttccagttgggaatctttatttccaactcttagggtggctaaacccttttctgaatgccaaaaggcacactctcaccaccttaatgaggaaacacacttatctgtgtctgttccgatatccaactgggacctggaccccaagccccgtggtgtcttgtacaagtctcattagtcctccacgtacaactcanaagcctgttaatcagggagggtaatttccaaataaatgtgagctggcctaaatccagctggttatttctgatttggtaatctgtagtatcttaatttggggacatcctgtcctaagttttggctggtgcatgtagaacttataatctacctgtataacaacagatgcaacatagctccgttccagccccaaattccttaaaggttctagtctactcttgcacttcttcctgtactgttgttgagaagcttacattttagggagaggctggtcaaatctctactctctggtaacagcattaacaagagtctttcttttggaaacagactcagaagttatggacatcagccacttcagacttctttaggccantatccttgaggtgactgaccagcctcctcatggattggagtttcccatcattgttttaattgctggaaatgttggcctaattctgcttccttgtaactttctgctttttagtacaagttctcttgggaatctacgcatggtaaaaataccagctccttccatctttacagccctgtcagtgctgtgctcttcaaagcctttcccttaatagcaagagggccaagagtggcaaatagaggcagagccgcctgcactacagttgttcccatcgtaaggtgaaaacgaacgtttaacttcatctagaagaaaaaancaaacaaaaaacccatcaggctattaagattctgcttgcaaattaatgccaatccatgtttacattttttttttnatcattgagacatttacatatatatgcaggctctgctccttaacaaaaggtgaactgaaaaactcaagggtgtttgtttttcagttaaaaaaaaa

SEQ ID NO: 248 - DNA, 1718 bp, Homo sapiens
  modified_base (35)..(37): a, c, g, or t
  modified_base (39)..(39): a, c, g, or t
  modified_base (41)..(41): a, c, g, or t
  modified_base (43)..(58): a, c, g, or t
  modified_base (61)..(61): a, c, g, or t
  modified_base (63)..(63): a, c, g, or t
  modified_base (65)..(66): a, c, g, or t
  modified_base (69)..(71): a, c, g, or t
  modified_base (74)..(76): a, c, g, or t
  modified_base (116)..(116): a, c, g, or t
  modified_base (183)..(183): a, c, g, or t
  modified_base (223)..(223): a, c, g, or t
  modified_base (233)..(233): a, c, g, or t
  modified_base (240)..(240): a, c, g, or t
  modified_base (273)..(273): a, c, g, or t
  modified_base (314)..(314): a, c, g, or t
  modified_base (1094)..(1094): a, c, g, or t
  modified_base (1691)..(1691): a, c, g, or t
  modified_base (1696)..(1696): a, c, g, or t
  modified_base (1699)..(1699): a, c, g, or t
  modified_base (1715)..(1716): a, c, g, or t
ggcaggaccagtggggcccaaatcttgctgctctnnnantntnnnnnnnnnnnnnnnnagncncnnctnnntcnnnctgccctggagaaaggtagggtgtgctgggcctgcccctngcaaatgggattcaccagtttcatttatttgactctactgccacagtgaaaagagcaaacagctatngggttgcaaacctcctttgacattaggaaatgttgacttngtaacaatanaaacttnggtcctagaaagacacggttgtcctgggagttngtagtgttaagttgcaacaacaacaacaaaaagcaacaaanccagcttaggataacactttttgttgcttgttcttaaagatgtctcactatgattaaaacccttttcattaatgtagtgaaagccacacaggagttccttcttccaggaggagaataccaagcacatcactttctctctgcatcagtgatgtcaaatacgcatcagaaaatgttcaggttttaggagctgtcctaggtgctgtttcatcattggaagcagtgagaaagagaagcactgctgcttgtctggatataggctgaggatgattgagagaagctgtgggaactgacacaagggtctgcataggtcatcctgtgaccctggggactatgttaccaactgacagacagatctttcactgtatcctagcagggcaggtagtccaccaagaaatgtgcttattggattgggaggtgtttatttgtagtctgctgtaacacgtgtgaaagagcaggagcgtcatcagcatatgacttgcgctggtcatccggtaaatggatgtgctgtagtcccagtgctaatcatttctctccttcacagtgggtggaagtttagggttaaatgtcctttgaatgtcacctggtgagtccttgacaccttaggctcttcagaaacaatggttttgttgaggatggggaacagggaatgccgattttatatacatggtacacagagaggggtgtcacttcagaaaatcttccagcatgttcttcagaatattaatttatatgcgaggtgaggttgggaatgaaaagaacaggtcagcacttttttttttncctagaacatacaaaagaacatggtggactttcagggagtgcaatggaaggtgaatatttccttaagggtccccgagaaatgggagtgaggggaggggacacaatggctttttgagcttacttttaccttctgatactagtcaaggtccagaaccagccaccagccaaatttctatctgggtgcgggccactgaaaatccttgttaaaaaccagatcacaaatctggggctcttggtcccattggagaaggaaggaagagcctcaaaataagtgtgcacccatgcacatattcaggaacagcttgtttagtctttacactttgcctgaaagttgcttctcctcgtccctttgtgtgcctgggtggcctcggccctgtgcgttggcaacgcaggatcaaatgtgctgcagcttttgcagaaaacaactcagaaacacaaaaccccccaacagctcaattattattttttcaatgttttcctacaagagccaagtagcaccatgtacagaagacgcctttttttttggaatattgaaatcgttctgcatgtaaaatatgggataatgacctgtttatattaaaattctgattaaattanctganaanaaaaaaaaaaaaaaannaa

SEQ ID NO: 249 - DNA, 1017 bp, Homo sapiens; identical to SEQ ID NO: 58
  modified_base (234)..(234): a, c, g, or t
  modified_base (238)..(238): a, c, g, or t
  modified_base (243)..(243): a, c, g, or t
  modified_base (301)..(301): a, c, g, or t
  modified_base (387)..(387): a, c, g, or t
  modified_base (406)..(408): a, c, g, or t
  modified_base (1001)..(1001): a, c, g, or t

SEQ ID NO: 250 - DNA, 1130 bp, Homo sapiens
  modified_base (72)..(72): a, c, g, or t
  modified_base (89)..(89): a, c, g, or t
  modified_base (139)..(139): a, c, g, or t
  modified_base (149)..(149): a, c, g, or t
  modified_base (158)..(158): a, c, g, or t
  modified_base (448)..(448): a, c, g, or t
  modified_base (486)..(486): a, c, g, or t
  modified_base (624)..(625): a, c, g, or t
gagtgtctttaaatgaggtgttctagacagtgtgctgataatgtatgtgcgggtgacctcttcgctatgatngtatctcttactgtttngttaaagaaatgcagatgtgtaactgagaagtgatttgtgtgtgtgtctnggttgtgatnggattcttnggggggggggaactgaaacatttgtcatatactgaacttatatacatcaaaagggattaatacagcgatgccaaaaagtttaatcacggacacacgtccgtttctgtagtccgtatgctctttcattcttggtagagctggtatgtggaatgccatacctctgaccctactacttacctttttactgacagactgcccacactgaaagcttcagtgaatgttcttagtcctgttttcttctgttactgtcaggaaactgagtgatctaatggttctctcacttttttttngttcttttagtgtactttgaagtatcaaatcttaactnggtttaaacaatacatattcctaacctttgtaaaaaagcaaagattcttcaaaatgacattgaaataaaaagtaagccatacgtattttcttagaagtatagatgtatgtgcgtgtatacacacacacacacacacanngagataaacacaatattccttatttcaaattagtatgattcctatttaaagtgatttatatttgagtaaaaagttcaattcttttttgctttttaaaaaatctgatgcttcataattttcattatattattccacatatttttccttgaagttcttagcataatgtatccattacttagtatatatctaggcaacaacacttagaagtttatcagtgtttaaactaaaaaaataaagattcctgtgtactggtttacatttgtgtgagtggcatactcaagtctgctgtgcctgtcgtcgtgactgtcagtattctcgctattttatagtcgtgccatgttgttactcacagcgctctgacatactttcatgtggtaggttctttctcaggaactcagtttaactattatttattgatatatcattacctttgaaaagcttctactggcacaatttattattaaaattttgaatccaaaaaaaaaaaaaaaaaaaaaaaaaaaaa

SEQ ID NO: 251 - DNA, 2110 bp, Homo sapiens
  modified_base (13)..(14): a, c, g, or t
  modified_base (19)..(26): a, c, g, or t
  modified_base (28)..(28): a, c, g, or t
  modified_base (493)..(493): a, c, g, or t
  modified_base (496)..(496): a, c, g, or t
  modified_base (526)..(526): a, c, g, or t
  modified_base (533)..(533): a, c, g, or t
  modified_base (544)..(544): a, c, g, or t
  modified_base (1142)..(1142): a, c, g, or t
  modified_base (1249)..(1249): a, c, g, or t
  modified_base (1257)..(1257): a, c, g, or t
  modified_base (1604)..(1604): a, c, g, or t
  modified_base (1733)..(1736): a, c, g, or t
  modified_base (1738)..(1739): a, c, g, or t
  modified_base (2069)..(2069): a, c, g, or t
  modified_base (2079)..(2079): a, c, g, or t
ttttttttttttnnttttnnnnnnnntnttgatgtcactgtggtttattaggtaaatacaaagtataggctcttgcattttttaaaaagcaaaaccaaagagattagaaaccaagtacacatatcctctttagaagagaaacataaatcagttttaacaattaggcacttaaaaatgtaaatgtaagacaacattatagaagtataaactatagttacactcctaaattcctcctgaaatgtttacaaacacaaaatcacaagcatggaaaacaaatttcctctttatcaaaaaaggaacctgaatttgaatccaatgtgataaaccaatgattaaggtactggtgggtaggaaaaaagagcttctgaaatttacatatttgattaaaatgtaagcatttcataaaactatcacaatagcatacagtagatatcataatgaaaaatatatgtcaggaaaataatgaatctagacttaaaattttactttacancanggcacttaacacattgaaacagtacagtanatttccnaaaagaatgcnattggctacctctgaaaccttgtaataatatttcttttgtgaatatacggtaacataaccatacattttgcagcattaatcattgcataggaggtaaattaaataatgaattctaacttggcaattagattagtttttgttcatcgtttcctctttttcttttaaaggacagttttaaataatttcacaataaagcactcttctcattcatgatttatttagaacacagcataatgagtaagaaaataaatcagaacttataaggtgtgtatctgtataaaaacttatctttgggtaacattgacatgattttcagtgtttgggtgttgaagtcaagagcacttcttaatagaagaaatattttcagcaactgagtcaaaggagttaaattattgcaacacaaggacactaaaaacaaatactaaaaatctttatatatataaatagaaaagccttcaacacatggcatataacttataatatgcttgatttaaacgtgtaaactcattaagaaactccttctcacacttccttacactacagaggctagtgcattaagattggcttaaagttttcatcagttttacagtgcaaaacnaaaacaaaaaagaattaagaaagaaatgttcaaactattcaaggggcaagatgtgaactttcaactaaaaaagaaactgcatgagttctgtcatgtaaaaaaaaccnagacaacnaatttggtgtttcaaagtaaacaaaacataggtcgttataaagggagacactaatgattgtgatcatgagaggtaaaaatgttctacaaattttctttgatcaaatggatacaaggttagaattacaagtgcctataatctgagcacattttacctttgggaaaggtttaaaatgcttttaaaataattcctttcacatgatactttcagattattggcaaacaacagaaaacaaatgcctttcaaaaacttgaaaacaggcttttaaaagtggtgtttgcattccaagtcataaagtatattgccacaagggggcactggtaatacaggaaataaccctaatgcantgtcatccacaaaccagagtagactcaacgctcactctcaaaacagccttcctgccacagcaaaacttgtttcccaagatgccagtaaattaagtaacaaattcacaattagttcaagtggactcaggnnnngnngctttattttcagatctagtggacaagctcaaaaactagaatctgagagaatttcatttgaaatgagttagaaaaaaaatgtggcatactctataggaattatatgttataggtatttcacagacaacctaaattacaggaaaagcttcaaacaggagcatagacttgaaaaaaacaaagataataagatatgtatcttaactggcaaagaacaggtaccccaaacatttatgatttcaaaggcaagatcatacttgttttatatcttcagtttatatatatatcatacttgttttatatcaaagtggcacattgggttgaagctcaacntttctttccnacatgtaaatgggttttactatttgttttat

SEQ ID NO: 252 - DNA, 1009 bp, Homo sapiens
  modified_base (517)..(517): a, c, g, or t
  modified_base (552)..(552): a, c, g, or t
  modified_base (803)..(806): a, c, g, or t
  modified_base (809)..(809): a, c, g, or t
  modified_base (837)..(837): a, c, g, or t
  modified_base (882)..(882): a, c, g, or t
ttttcttgagttacctcccgcagccgcagccgccgtgctcagcgcgagccccggagcccttgagcgcgaggcgcggagcccccggagcccccaaaccgcagacacatccccgcgccccagagccccggcctgcgcgcccagccgggcccgcgcgatgccctcagaccggcctttcaagcagcggcggagcttcgccgaccgctgtaaggaggtacagcagatccgcgaccagcaccccagcaaaatcccggtgatcatcgagcgctacaagggtgagaagcagctgcccgtcctggacaagaccaagtttttggtcccggaccatgtcaacatgagcgagttggtcaagatcatccggcgccgcctgcagctgaaccccacgcaggccttcttcctgctggtgaaccagcacagcatggtgagtgtgtccacgcccatcgcggacatctacgagcaggagaaagacgaggacggcttcctctatatggtctacgcctcccaggaaaccttcggcttntgagccagcagtaggggggctcggcctgggagtcngggggccccggtcaggccctgcccagagagctcctggttcctgaactgagctgcctctaccgtggtgggctgggcaggcatgtgcccccctagtcagagggcaccaacccacctactctgcccctgggtggatcctgggccggtcgtgttagggttgtccctctgggtgctggctggtgggatgggggagggtggggagcagctcccagcacccctgctgtgtggttcatcttttttttaggcccctgccnnnntgnccatctgcccctcacccacccgaggctntgcccaccgcctggacctgcccacccctgaaagactggcccctgnctccccgcccctcggtctccacgtggtgtatggatctgtggtcattgtccctctgcagaataaagattgctcaggcctgcctggcaaaaaaaaaaaaaaaaaaaaaaaaaaaaaaaaaaaaaaaaaa

SEQ ID NO: 253 - DNA, 1807 bp, Homo sapiens
  modified_base (72)..(72): a, c, g, or t
  modified_base (79)..(79): a, c, g, or t
  modified_base (94)..(94): a, c, g, or t
  modified_base (182)..(182): a, c, g, or t
  modified_base (324)..(327): a, c, g, or t
  modified_base (329)..(334): a, c, g, or t
  modified_base (676)..(676): a, c, g, or t
  modified_base (812)..(813): a, c, g, or t
  modified_base (815)..(817): a, c, g, or t
  modified_base (819)..(819): a, c, g, or t
  modified_base (822)..(822): a, c, g, or t
  modified_base (824)..(824): a, c, g, or t
  modified_base (1313)..(1313): a, c, g, or t
  modified_base (1317)..(1317): a, c, g, or t
  modified_base (1350)..(1350): a, c, g, or t
  modified_base (1360)..(1360): a, c, g, or t
  modified_base (1368)..(1369): a, c, g, or t
  modified_base (1371)..(1378): a, c, g, or t
  modified_base (1384)..(1385): a, c, g, or t
aatataatttcccataaaacatgaagtcctgttttgagttttattcccatgtgctatggtccctttggtcangtaccanggctctatttctgcntaagccccaagtggccatgctagcagccagccactatcgatttcctgtgaccgatgccattcctgagatcttcgcccatttccgttgnagggttgggactgtaagagcttgatgccacctctgtcacacatctcgccctgaagcaaacagggattcacactgctttagtaatgttgactcccaagaacccaagaaagtcaattaataatccaccaagtccagcctaaacnnnncnnnnnnccatacctgtttacatggaattacatccatgttaaaaaaaactaagacacaagaatcttaacattaaaacagaaagtagctcttcaagagtctaagcattacaaaattacatacactatttaaatctatcaagaattcattaaaaggtttagtgaaatgtttaaaagtttgattacatcagctataggagtaaagtgctaacttacaaagcttacagtttgtgacaccagtgataatgcatgcatactgctattttcaccaccaactggtgaaacaatgaaaagacagtttacttttactgagataccgaaatgagtcaaagactatattagccaatataantcctttgtttttagtgtgaaatactatggtagggcctaattaaaaataaaaacaatatggagaacagtaaaacagtcatcaagtgactctaagcttgtatttactctaagcttgtattaagcttgtattgactctnntnnntnttntnttttttttttttaatttctattcagggatccaagaattttagtaattattaactgagcagcagattgccactggactgttttaagatttactatcaccagtcttacatagatacataaattttaaaatctcacccatttcttcttataagactattagaagatttaacttgccacagactggtcatgctttgttattcttggacccctgctttttcccaaaccactacattcacctttttgctataccaaactggaggtggtaattcttagttgagtcattttacctaggggaccacggtacagcgataagtcactcaattactaccttatgattgacagttcacactggaatcaaaggtgaattcatgggagtagaggtgagatatcgttaggcaagtctacaaagagagatagatgggcatttattcatcacgctgaagtgaaactactgcacaatattattacatcaatagcatatatttactttngtangttacacgtaatgcatctctgataagataaatnaagagggctnccgggganntnnnnnnnnatttcnncagtagtttcgtgaataatgctaaattaagaaatatataaacctcaccgacatgttttttctcaccttcttgtaaggagcctcaagcattgcttcaatatcaatatcgtctgccattttctctaaacgcctgttccggccttcgggcgcctgtggtgctcgtgttcgggaagagattgctgctgctgctgctgctgctgccgccgccgccgcttctgttgctactgttaagcccctaggcccaggccgcggaaccgcccagcccgaatatcgggttccaaggacggctaggcccgagagaatctaaaaaaaacaatggaattagagaagcccacgcgggagagcaggacggcggcttcggcagctcaggatccacccctgcgacagcgtcgacaagctccctgaaatggcggccgcaagctt

SEQ ID NO: 254 - DNA, 898 bp, Homo sapiens
  modified_base (356)..(356): a, c, g, or t
  modified_base (670)..(671): a, c, g, or t
atttattttatttgcaggaggagttgaaacaaattttaagggagattttcattttccccctaaacatgaatcattcaagtaaaaccaacttaactatagaaatgtagcaaagtaaggggaaagcagcacaacaacccaagaggcaaaggctgggggggagaggtgggtgcagtccgcatataacatatgcataaatgccttatgattcacctgctcaggaccgcctccccagaaggcaagcacaaggacccattttaagaggatgtttccccccaaacatctgagaatgcttcaacttaaacagcttaaggttaaaaagacaaagaaaaaaaaaaagaaacccaaaaaaacccctngaaccacccagccataaccaccttccttaatcgatcataggagtttcttttcattttataaaaagattaataaaaaatattgaaaaaattttctcatatttgtaaagataatagaattcataagtttcttagaaaacagaccagacactgccctccagtttccaccccgttgctgggaggatcagcaggactagaaagtttgggatactggagctgctggtggagaacggggaagtccagcccagaagaaatcaggaaatagggctcaggggcacgtgaggtgtggtaaggagcaactccacgtgatacatggnngcgcagaaaaggggaacacaaggtggtcggaaaggccttaaactcctccttgacatacaaaaccggtttttacaaagatccaagcagtttggtcccaaactgaggtgaacacttcaaagtttattcacatgcttttgttttctctttcaagaatcaaagtttcccaaattaaatgtttctaatattactacatatgcctaaaaaaagaaaaaaaaaaaaaaaaagag

SEQ ID NO: 255 - DNA, 1936 bp, Homo sapiens
  modified_base (27)..(27): a, c, g, or t
  modified_base (220)..(220): a, c, g, or t
  modified_base (237)..(237): a, c, g, or t
  modified_base (253)..(253): a, c, g, or t
  modified_base (292)..(292): a, c, g, or t
  modified_base (300)..(300): a, c, g, or t
  modified_base (312)..(312): a, c, g, or t
  modified_base (329)..(329): a, c, g, or t
  modified_base (340)..(340): a, c, g, or t
  modified_base (342)..(342): a, c, g, or t
  modified_base (367)..(367): a, c, g, or t
  modified_base (740)..(740): a, c, g, or t
  modified_base (1223)..(1223): a, c, g, or t
  modified_base (1230)..(1230): a, c, g, or t
  modified_base (1234)..(1234): a, c, g, or t
  modified_base (1239)..(1240): a, c, g, or t
  modified_base (1242)..(1257): a, c, g, or t
  modified_base (1259)..(1263): a, c, g, or t
  modified_base (1265)..(1267): a, c, g, or t
  modified_base (1269)..(1274): a, c, g, or t
  modified_base (1277)..(1278): a, c, g, or t
  modified_base (1280)..(1280): a, c, g, or t
  modified_base (1290)..(1290): a, c, g, or t
  modified_base (1301)..(1301): a, c, g, or t
  modified_base (1305)..(1305): a, c, g, or t
  modified_base (1309)..(1309): a, c, g, or t
  modified_base (1316)..(1316): a, c, g, or t
  modified_base (1319)..(1319): a, c, g, or t
  modified_base (1321)..(1321): a, c, g, or t
  modified_base (1343)..(1343): a, c, g, or t
  modified_base (1348)..(1348): a, c, g, or t
  modified_base (1350)..(1350): a, c, g, or t
  modified_base (1359)..(1359): a, c, g, or t
  modified_base (1364)..(1364): a, c, g, or t
  modified_base (1370)..(1371): a, c, g, or t
  modified_base (1376)..(1376): a, c, g, or t
  modified_base (1883)..(1883): a, c, g, or t
gtgctttatggcgaaggatggagtttngctcttgttgcccaagctggagtgcaatggtgcgatcttcgcttactgcaacctctgcttcctgggttcaagtgattcccctgcctcagcctcccgagtagcagggattacagatggagcctcgctctgtcacccaggctggagtgcagtggcacaatctcgggtcactgcaacctccgccccccagcttcangcgattctcctgtctcngcctcccgagtagctnggattacaggtgcacgccaccaggcctggctaatttttntatttttngtagagatgggnttttgccttgttggccnggctggtctcnanctcctgacctcaggtgacccatccnccttggcctcccaaagtgctgggactacaggtgtgagccaccatgcctggtcccccacttgttgattttgcagaaaagatagctgtgttacaacctgtcctaaggtcaggtatgaatacttgtgcttctttcttggctccccaagccagagggcattcctatgcccaggtgagagagcacggagtgttactttggcagcacagtcagttaccagaggtaggaaaagcaaaggccaggcaggacatgaggggcccttgcactggctggttctccctgccttcaccaccctccaggtgaatgactgggtgaataatgattgactgaggaggtaatgaataatttatggacactgctggacctcagtctcctcatntgaaagatgagtggttggagaagtttaatggttttcaaatgctttttttttcagtcttcaaataagtgtttacgtagaagcaccatatctgaaacaggtgacagtggaccagtctgaatgaaatgagggttggcaggcctgagctccaaaaccttctgattgcccaagccctccttgtcttgcttggattatctccacacaaatggagaaactggacaaggtggtcatggaggtccctgaaagctcaaagactttctcattccaggattccccatgttcatatgccagcatggcatgggggtgctctgtagtcaagcagggtcctttggggggcttagggatggagccaggaaatggctctgggactcagcgggtgtccagagtctcatcagcagggtttctttactttcactgagtggctggtgcctgcacactgagttttgcaggcttactctcacagagtgagcttcctgcaggcccccnactgcancccntttcnntnnnnnnnnnnnnnnnngnnnnntnnntnnnnnnccnngnccctctcccnatgctgctgantggncagnctttctntgncncgctcgtggttgccacagtcancgctngntaaaattgntgatncagatnngcctncccagctgcgagtgctggcacgggaccagcagcccagacggtcactggaagtggttgggctgattattggcatcatctccattgtcctactcggttcttaaaggcatatggacttgcctcactcctacagcaaatgacggcatgggcaaagaggggcaacagacccaccctgaagacactcctcatctggttgacttggcagggttaagggaaaaagatgtgatgactaggagctgagagcttagtggttctgccagagctgcagagtctttgttggcctcagggtgggacctctcacatctctgtcagcttttcacagacaccaacctgttatgattcatttcacctgtcctgagcactagcaagaaaaattcgctgtagcttgtgatgtattattctggatttctcaactcattcatttgttcattcattcactataccattactgtctattataaggggggcacaatggtaggtgctgggaataaaaacgatgtttaacgtttnaaaaaaaaaaaaaaaaaaaaaaaaaaaaaaaaaaaaaaaaaaaaaaaaaaaaa

SEQ ID NO: 256 - DNA, 612 bp, Homo sapiens
  modified_base (51)..(53): a, c, g, or t
  modified_base (543)..(543): a, c, g, or t
  modified_base (546)..(546): a, c, g, or t
  modified_base (548)..(548): a, c, g, or t
  modified_base (550)..(550): a, c, g, or t
  modified_base (558)..(558): a, c, g, or t
tacggctgcgagaagacgacagaaggggcatctcgacatcgatacgacttnnnttttttttttttttttttgcttcaatacttctgccgctttggaaattgtaacagttaattactttgaatgttgctaaaaggacattttgtgtagggtcaagttatttttatatgagttaatgtgaaattgtaaatggaaatttttccttaaaatacaacacaatgatgtctgtataaatctgtctgtttagaatctgtgctgtgtaagggcattcgtactcatgctgttactgtacttatgcaccattcagacttgttagagtagatgtgggtttatgactgccaagtttgcccagtacagtagttttttatcactaaaagttggactcattgatggagtcctgtagtagtttcagtgttagatacagttttttccaccatacatctgtgcattttctctttaggtgactgtttaagaaatttgtgtgcatagttactcagtttttatgaactgttgtatcctgttaatgcatattgctctgtgactccngtnanancttacctntactgaccatacctaaataaagatttttattgtaactccaaaaaaaagtcgacg

SEQ ID NO: 257 - DNA, 1192 bp, Homo sapiens
  modified_base (155)..(155): a, c, g, or t
  modified_base (159)..(159): a, c, g, or t
  modified_base (513)..(513): a, c, g, or t
  modified_base (585)..(585): a, c, g, or t
  modified_base (649)..(649): a, c, g, or t
gtgaaccgaagtccttatattcccgggcttctttctcctctgggtaccagctccttactgccctgcagacaagcgtgccgtgcgtgcttgtggccaagggaaggaagagctggttgatccacagatagctccttcctccccgccccttccttttngttnggaggtcccaggatctgtgttcacagacatctgggggaagaaaaggagcaggaaactaccccgcacagagttaagcaggaaacaacaacaacatcatgcaaaaaccctgcaaagaaaacgaaggaaagccaaagtgcagcgtgccaaagagggaggaaaaacgcccgtatggagaatttgaacgccagcaaacagaagggaattttagacagaggctgcttcagtctctcgaagaatttaaagaggacatagactataggcattttaaagatgaagaaatgacaagggagggagatgagatggaaaggtgtttggaagagataaggggtctgagaaagaaatttagggctctgnattctaaccataggcattctcgggaccgtccttatcccatttaattaatttctctgacaattcaattatttnctgttattaatgttgccactgctttctgtttgtctgcactttcttgataaatatttgctatcgntttactccagtcattcgatgttgctgagatttacatatgactcttgtcaacatctcatcttttgacccaatcttattcatttaataagaggtctcattcatttgcatggaaaaatgctcattgtatattgcaaagtgaaaataacgagttgcaaaacagtgtatacatatatgtgtgtatatatgtacactttatttgtacatttctatgtgacataatgcaaaggaaagtgtctgattttattatacaccaaaggttaacagtgaatctctgtgtgatctctttttttttctttttgcctatctgcatcttctcacttgccaaaaaatgaatatatgtttatgtgtgtatattacttgtgtcacaaaaaaccctaaagtagacagtaaaagaacttgtcaatcgcctttggaaggcaatgaaacacttaataaactctcaataacagaagcgtaaaaatgaaatgtaaacctccaattacctctggatctcttagccagagtaataaactggtaattattacagataaaaaaaaaaaaaaaa

SEQ ID NO: 258 - DNA, 784 bp, Homo sapiens
  modified_base (519)..(519): a, c, g, or t
  modified_base (540)..(540): a, c, g, or t
  modified_base (684)..(684): a, c, g, or t
  modified_base (687)..(688): a, c, g, or t
agcggccgcccttttttttttttttttttttttttttctagtatgtgctaattatgaattttattaaggtttattcaatgtcacagaggaaagaacggtttgtagttttgcttacccgcagtgctggcaggtcacagctgtccaaccatgatccattcacatgctctggccccgtgcccctcgtcctcccacccctaccccacaggacaccattaagccagggctgggtaacaacatatgctcaatgcatcttctcaggtgagaaccaaactcgagccacaacagcaaagggggaaaaaggtagcaaagtaattatgtgctcccaaggcagtcatttagttgaatccataactggaaataaaaaggcatttatgaagtgtagtccgcagtctgaatgtggaaggtggaagatcacacatttactaagaaacactcaaaacatattttggttcagaattctaaaaaatcccgaattttccatgatcttcccaagacaaccaatgacccacttaaatttanggcaaaaacacccttgaatcnaggaatgtgcacatatgcaacagctaacatctggtaactctaataatgttccttatatgtttctgtgtttactatcatgaaccataggaagaagtactggaaaatttagtaagtgtggacagttaaaaacactggcccggcacngtnngcacgcctgtaatcccagcactttgggaggccgaggtgggtggatcacgaggtcaggagttcaagaccaggcataccctctacacttataaaaatg

SEQ ID NO: 259 - DNA, 865 bp, Homo sapiens
  modified_base (21)..(22): a, c, g, or t
  modified_base (24)..(30): a, c, g, or t
  modified_base (32)..(32): a, c, g, or t
  modified_base (35)..(42): a, c, g, or t
  modified_base (98)..(98): a, c, g, or t
  modified_base (114)..(115): a, c, g, or t
  modified_base (233)..(233): a, c, g, or t
  modified_base (388)..(388): a, c, g, or t
  modified_base (479)..(479): a, c, g, or t
  modified_base (498)..(498): a, c, g, or t
  modified_base (504)..(504): a, c, g, or t
  modified_base (514)..(514): a, c, g, or t
  modified_base (843)..(843): a, c, g, or t
  modified_base (845)..(847): a, c, g, or t
  modified_base (850)..(853): a, c, g, or t
gggtctctataatcaataacnngnnnnnnnanatnnnnnnnnataaagatattatatataaatataaatttacatatatatgcacatgtatatatagntgtacatatatgtgtnntatatatatacttaaatgtaatatttacaaaataaaactgtgatctcgtctagagaaaatgtattcatattacaaactgctcttccatatttatgtaccatattatacctttttattnttgttataattattatgggtatttctaattaatatgatgttgaaacctgtttggcaccttctggaagctaccaaaaaaatgacactccattgaagtgcttaaaagctgttctcataagaattctactggcctattgtaaaaaagaaaaaaaaaangaaaaagaagaaagacacaaagaaaataatctaaacaccaaaaactaaacacaattccaatcctttttctgtacctcacgcgcataaattngctgctcctattttttttnctgttnatgtgttttnatggatctaagttaaatcttttggcaatatataaaaatgtaaatagtaaactttatttattaagaatgtcatcttttttaatttatatttacacaattgttcatctaatttattttttctatacagttttaaatactcagacatattttgctgttcatgatatttttatcctgttctcatggatttgttttcccatactgttttctctgatctcaattacaggttggatctcacaaataataatgtcagagacagaaatattttgccactgttgattactatactttaaagttctatattatgaaaatatataatagcttgtacgcttnannnaannnntccggctcgatt

SEQ ID NO: 260 - DNA, 888 bp, Homo sapiens
  modified_base (130)..(140): a, c, g, or t
  modified_base (142)..(142): a, c, g, or t
  modified_base (208)..(208): a, c, g, or t
  modified_base (236)..(236): a, c, g, or t
  modified_base (263)..(263): a, c, g, or t
  modified_base (282)..(282): a, c, g, or t
  modified_base (289)..(289): a, c, g, or t
  modified_base (321)..(321): a, c, g, or t
  modified_base (345)..(345): a, c, g, or t
  modified_base (354)..(364): a, c, g, or t
  modified_base (366)..(366): a, c, g, or t
  modified_base (839)..(839): a, c, g, or t
  modified_base (841)..(851): a, c, g, or t
  modified_base (853)..(854): a, c, g, or t
  modified_base (857)..(861): a, c, g, or t
  modified_base (864)..(864): a, c, g, or t
  modified_base (866)..(866): a, c, g, or t
  modified_base (868)..(869): a, c, g, or t
  modified_base (871)..(872): a, c, g, or t
tttttttttttttttttttttttttctatagtaataggttctcattttattcaataaactataatctaccattatcattattaatttggatgctcacatcatcccaaatttggccactggaagccccttnnnnnnnnnnnangtgtcctttgacatgtccctgtcattttttaaatgcttccttgctttctggcaccacacagcactntgggctcaccttgtacttccctaccccngccttagcatcagccatttctacaagnagctctgagtccttttagngaagggnggtatttataaaccacaatctggatggtttgnggatattgcacagcattcagtcanaagccatgnnnnnnnnnnntnggaaatgaagcgacatttattgaaacttgtattagtcaagcaacttaatgctaggctaagttgcagtgagtaataatccctaaccccagtgacagtgcagaaaaagaagggtttcatatgtggagtgtgatgcatgtcaatgggagtttcctccacctggtgactcaggtatccaggcacattcatctctgcaggtctgccatcttgacacgaggtcattgcagaaggagagagggtgtagagtcatgccagttcttaggtgctcctgacaaggagatctgcagcactctgctcacattcctgttttccagaactcagccagtacccagtgcaactgccaaagagtcttgcaggacggagtcttggccgcagactgagcctgtacctcacccgtctcccaccaactcttggtactggacgcagtcatgctgggcagctctatggaggcctggcgggctagcttgggggtctgncnnnnnnnnnnntnncannnnnggngngnngnntgggcctgaggtctcc

SEQ ID NO: 261 - DNA, 1001 bp, Homo sapiens
  modified_base (17)..(17): a, c, g, or t
  modified_base (471)..(471): a, c, g, or t
  modified_base (475)..(475): a, c, g, or t
  modified_base (484)..(484): a, c, g, or t
  modified_base (490)..(490): a, c, g, or t
  modified_base (501)..(501): a, c, g, or t
  modified_base (535)..(535): a, c, g, or t
  modified_base (679)..(679): a, c, g, or t
  modified_base (985)..(987): a, c, g, or t
ttttttttttttttttntggaagtaatgtctgtttattgatagaaaacaggccacgtccagagaggcccagggccaaaacctccttctggaaggccgaagtcccacagtgccggggagcgcaggagtcagctcggctccgtcttgccagggctggggggaccctcatcctcacccgcttccggagctgcagtggatgtgggggcccctgcagcctccagaaccagttccagggccccctcgcccgccacacggtgcacctgctcgcctctggccgtcaggatctcttcgatatttctcttcccattcaggtccgagaaccagcccaggttgtcagcgatgatatggtggttctggcagccggggcaggtcacaatgaccacgccttggtgataggccagcttggagatgcgcttggaggacctagtcccgcagaccttgcaggtgtagacgagctggtagtgcgccgcctncacngcgccccangagccnccgcgggcccnggcccctgctcggagcttgagcgccgccagcccnaggcccaggcccgccgcctccccgcgacctctggacgggccccgcggccccacagccgcctcaggcagggcgcccggggctgcacgcgactcagcaacctcggcgcgccgcgcagcgcagtccgcagcatcccgctcgccggcnccgtccgccctgccccggccctgccccggccccgccccgccgccatcttggaagtgggcgccgggcggaagcggcgttcttgggcttccgtcttccgggtcgggggcgcgctgcgctatgccgccccctggcggcctgagggggccctgcgtccacgtgcagctcgcaccccgaggacaccgcgggccgcagcgaggagggacggccgcggggctgcgcgcgagtgtccgagcgggaatgcgggtcacccgtgctgtttatttacgcagctgtgttttctaacactaatacaatgcatgcatgtannntgtgttacatggtg

SEQ ID NO: 262 - DNA, 867 bp, Homo sapiens
  modified_base (2)..(2): a, c, g, or t
  modified_base (6)..(6): a, c, g, or t
  modified_base (134)..(134): a, c, g, or t
  modified_base (158)..(158): a, c, g, or t
  modified_base (495)..(495): a, c, g, or t
  modified_base (569)..(572): a, c, g, or t
  modified_base (609)..(609): a, c, g, or t
  modified_base (618)..(618): a, c, g, or t
  modified_base (634)..(635): a, c, g, or t
  modified_base (639)..(639): a, c, g, or t
  modified_base (645)..(645): a, c, g, or t
  modified_base (670)..(670): a, c, g, or t
  modified_base (679)..(679): a, c, g, or t
  modified_base (692)..(692): a, c, g, or t
  modified_base (702)..(702): a, c, g, or t
  modified_base (710)..(710): a, c, g, or t
  modified_base (724)..(728): a, c, g, or t
antganttaaagagatgaatttattggtaaatagataaaattaacacctattttaatatatccaaaccccttccttatatatattaggtaaattaaaagaaaaaaattatcaaagcaatactacagccagctanatcgccaatttacaaatgagttangtaagtaccataagtttgtttgaatatcaggtgcttcagagtttttctcaaacagttacaaaagagattaggttcccaatcagttcacaaaagctaatttaaagaatgtagcttaactacagtactgaggttgtcacacacttaactttcggtctcttgcttatttattcatatctgaggttcactgtttctactaggatacattccgcccacacccacaccttggtccccacatcaagcagctcctcacagcaggaagacatccgctatcagacatggttttctgaagttgtgcttaggatttcagaggaggaaaaattcagaggttctaatagcnttcggtaactgaggtagaatatggggctcccaagaatatcttccatatgccccaaatctgtttccctcccaccnnnntccagctctgttcaaggtcaagtttgagaaagatacntgttctcanatggtatatttttaannatcnacatcnatttttaagagactacctgctaaanggagaatantggctcactgcantcttttctcnaccccctnaactattttaaaannnnntggcagggacaggtgccatgctcacgcctgtaatcccagcactttgggagccgaggcgggcagatcacttgaggtcgggagtttaagaccagcctgacccacatggagaaaccccgtctccactaaaaataccaaatta

SEQ ID NO: 263 - DNA, 1896 bp, Homo sapiens
  modified_base (2)..(2): a, c, g, or t
  modified_base (190)..(190): a, c, g, or t
  modified_base (475)..(475): a, c, g, or t
  modified_base (499)..(500): a, c, g, or t
  modified_base (515)..(515): a, c, g, or t
  modified_base (623)..(623): a, c, g, or t
  modified_base (706)..(706): a, c, g, or t
  modified_base (730)..(730): a, c, g, or t
  modified_base (757)..(757): a, c, g, or t
  modified_base (775)..(775): a, c, g, or t
  modified_base (786)..(786): a, c, g, or t
  modified_base (788)..(788): a, c, g, or t
  modified_base (793)..(793): a, c, g, or t
  modified_base (812)..(812): a, c, g, or t
  modified_base (832)..(832): a, c, g, or t
  modified_base (957)..(957): a, c, g, or t
  modified_base (1768)..(1768): a, c, g, or t
  modified_base (1856)..(1863): a, c, g, or t
gnctggctccttgaggggaggtgcagctttcatctgaccatgcaggcgtgctttgcagtgggtagagcagtgctttcctcctcccagctgcacactggaatcacctggagagtccagaaacttcccgcctcagtgaaagaacatcagtgtatcagcacagcaaatattccaaatgccaggctggattccntccaattaccaggacctccaggcttctcctcctttcaagaactttctgaccctggatccagtctaaatgttggttataaactcacctgacatccacagggcccttccaaaatactgtcaaggctgactgctggtgcctggaacctgcacaccctcctgggactctgcatctctgctggggctggtttctcctctgagccaccttaaggaatcccaccctgacccggtcagagctcaccatgcctccctctcctacttgctcagcattttgtgtctatctagactnaagcctttgctttctctctgtganngtggtgaaagttcantttgctttcctatctctagaatgtcagcacgaaggcagaggcatggtctcctgagttccataaccccaaagcctaactccctgcctgccacactgaggggcttagtanacattgacttactaaattgaatagttgagtaataatgctctttgaaataatttggagttagatcttgagccttgtgtggccangaggatgggtgaggacacatcatnaaaactaaaggtaactgagcatgccangtggttggggtgagaaanttgcatggagnantccangacacagaggcagcaaaancccaagtgctgggaagtcangagtgagagagtgaaggggcagtgagtgcttctttaggagctggatcaaaacctaagatgatctggccacatggtgcagactgagcacacacttgggagagaaatgggccaggaggagaggaganaggttcaccacaggacagtggatgactgggaatagaagccctccccatggtggaccaagaagtctgtgaagctgagagaaagacaaaagaaatcacgacttctgtaggtagctgggatggaaacctcaggggtgacagggtctttaaaggaaatctcaaggaaggcatcatgttctgggtgtgctccagggatgctgagtaagaaaagaccagcctttctgtgtgtgtctttactctgccacaaggcacctgggctcctaaatgaccaatacacatgtgctatactggtgccaagaaagaagggtgttttgtaggaaagtcaaggtgagaggaggtgcccaggacttggctcctttctttgaagggtgacggtgtaaattctccatgctggggatcctactgatggatggaggcatgtcgatctcatcatttcacagagtggggagctatggccacaacgtgcctatcacacaagtccagcctcacgtcagctggacaccagctgttctgacacttgtcagcacatggggcacccggaagttcatggtgttctgcaaagaacgccacaaaacagtgagctcaacttcttgaaagtcataatgtgttgctaagtccgatcccagatcctaaaaataatatgaggtagtggccattgaacagaaaaaatttacatcttaaacttgaagataagtacaagtgtacctttttctaccactgttgttcagttttattatattgacaagcacctctgcccaccctgtggggtaaaactgtttgaaagtgtttatgaaagttttatataaatattggntgatcaaatgtacaaaatatgcatgatggcaccatattgtgtataatagtgacaaatacagtctatgtgggtggagaaacaaaaaaannnnnnnnaaaaaaaaaaaaaaaaaaaaaaaaaaaaaaaaa

SEQ ID NO: 264 - DNA, 560 bp, Homo sapiens
  modified_base (518)..(518): a, c, g, or t
  modified_base (520)..(521): a, c, g, or t
  modified_base (525)..(525): a, c, g, or t
  modified_base (544)..(544): a, c, g, or t
atacctgtctccattcacatttacctgggaccagggtgggcaggagacaccaggtcatggctcctgagccccggccccctggactgaagggacagtgtgtgagaatcagttctgtgaagggcgggaggaagcagtcacctattcctcctgccttcacagttaaggtgaaaaccttagccctatccttgattcctgggggctgccgggccctgtgtgctcccctgcacacctgggtgcctttctgaggctggcagcagcggccggggtcaggggtcctgggctcctaggctcacacctcagctcacagttgcgtccttgcaggaggacactgggtgtctgacaaacacaaggcctcgacagcaggtctggaactttcaaccccagcaggatgagggggaatgggggtggatgtcaggtaagtaatttctggtcccactacaaaactttatttttgattagagtaccattctcaatctcttctacaaaaagcaaaaaaaagcaaaaaaaaaaaaaaaaanannggcngccatttcactcatttcangacctatatccttgta

SEQ ID NO: 265 - DNA, 804 bp, Homo sapiens
  modified_base (215)..(216): a, c, g, or t
  modified_base (220)..(222): a, c, g, or t
  modified_base (738)..(738): a, c, g, or t
  modified_base (743)..(743): a, c, g, or t
  modified_base (745)..(746): a, c, g, or t
agccatgagacccttaggttaattagggcatccaaaattaccttttgggaaaaagccctaaaggggggccccaagccctggattattttccccggggcgagaatttcaatatcaagctttttggatcccgggtcccttaagtttttttttttttttttttttttttttttttttttttttttttttttttttttttttttttttttttttttttnntttnnntgaatttaagactttactttattcagcaaaatcatttatttacacaatggggaatgctggtttgattttgtcaatgaaataaaaacaaaatgaacagagacaatactgaactgtatatatactttgtatcagagttgaccaactgtttccttacctgtatcaggaacatcaagagcaacagtatcacaaggacactggtttaacaatacaccacataggtccagtaataccctgggaatttcccaatgcaatcaccaactttttctttttttataaatatataaaaaaacaaaaagtcagcaaaaccagcattatgatgtagcaaacagagtataactctgaagtcagtggggtcagtaaaagccttatcagaccatccatagttttacaatgtgatctgctcttcctcagaccactaatatagaatccaaacaggtgaaaaatacgtcactccttagaatacaacaatgatctgataaggatttgacttagtggaaggaaaaaaaaaaaaaaaangggantnncagagcatagcccctattagaacaagctaactttccagattttacaaattaaaaaaac

SEQ ID NO: 266 - DNA, 1207 bp, Homo sapiens
  modified_base (193)..(193): a, c, g, or t
  modified_base (639)..(639): a, c, g, or t
tgtgtgtgtgtgtgtgtgtgtgtgcgcgcgcgcacgcacgccttgagcagtcagcattgcacctgctatggagaagggtattcctttattaaaatcttcctcatttggatttgctttcagttggttttcaatttgctcactggccagagacattgatggcagttcttatctgcatcactaatcagctcctggnttttttttttttttttcaaacaatggtttgaaacaactactggaatattgtccacaataagctggaagtttgttgtagtatgcctcaaatataactgactgtatactatagtggtaacttttcaaacagcccttagcacttttatactaattaacccatttgtgcattgagttttcttttaaaaatgcttgttgtgaaagacacagatacccagtatgcttaacgtgaaaagaaaatgtgttctgttttgtaaaggaactttcaagtattgttgtaaatacttggacagaggttgctgaactttaaaaaaaattaatttattattataatgacctaatttattaatctgaagattaaccatttttttgtcttagaatatcaaaaagaaaaagaaaaaggtgttctagctgtttgcatcaaaggaaaaaaagatttattatcaaggngcaatatttttatcttttccaaaataaatttgttaatgatacattacaaaaatagattgacatcagcctgattagtataaattttgttggtaattaatccattcctggcataaaaagtctttatcaaaaaaaattgtagatgcttgctttttgttttttcaatcatggccatattatgaaaatactaacaggatataggacaaggtgtaaatttttttattattattttaaagatatgatttatcctgagtgctgtatctattactcttttactttggttcctgttgtgctcttgtaaaagaaaaatataatttcctgaagaataaaatagatatatggcacttggagtgcatcatagttctacagtttgtttttgttttcttcaaaaaagctgtaagagaattatctgcaacttgattcttggcaggaaataaacattttgagttgaaatcacacagtgtaacttgcaaaaagattccatctctgagatccgaaagacttttaaggttatcagtccaatgaacccctggtgtaacaagaagtcccatgcttttgtcattaggcgggt

SEQ ID NO: 267 - DNA, 818 bp, Homo sapiens
  modified_base (2)..(7): a, c, g, or t
  modified_base (52)..(53): a, c, g, or t
  modified_base (74)..(74): a, c, g, or t
  modified_base (121)..(121): a, c, g, or t
  modified_base (125)..(125): a, c, g, or t
  modified_base (616)..(616): a, c, g, or t
  modified_base (751)..(751): a, c, g, or t
gnnnnnnctttttttttttttttttcagactgaccgcggggcagctgcggannatgtcgaccccggcccggagnaggctcatgcgggatttcaagcggttacaagaggacccacctgtggntgtncagtggcgcaccatctgaaaacaacatcatgcagtggaatgcagttatatttggaccagaagggacaccttttgaagatggtacttttaaactagtaatagaattttctgaagaatatccaaataaaccaccaactgttaggtttttatccaaaatgtttcatccaaatgtgtatgctgatggtagcatatgtttagatatccttcagaatcgatggagtccaacatatgatgtatcttctatcttaacatcaattcagtctctgctggatgaaccgaatcctaacagtccagccaatagccaggcagcacagctttatcaggaaaacaaacgagaatatgagaaaagagtttcggccattgttgaacaaagctggaatgattcataatagacaactggtctgttaatctttttcatcattgttgtgtataatttacctctcattagaaaggctaacaaattttaagtgccacaggttttaaggattctgnagaaaaaaaagaaaaaagtccttcagtttagaacctacaaaagcttgtgtatcttgattaatgtactttttattgcatggtgtgaactaagttattgctgcataaatttgtaatatatcctgtttgtattttttncaagtgtataatgttggtgtggagttttcatgacagaatatacacattttgtaaatctgtacttttt

SEQ ID NO: 268 - DNA, 771 bp, Homo sapiens
  modified_base (25)..(25): a, c, g, or t
  modified_base (102)..(102): a, c, g, or t
  modified_base (615)..(615): a, c, g, or t
  modified_base (620)..(620): a, c, g, or t
  modified_base (628)..(629): a, c, g, or t
ttttttttttttttttttttttttnttttttttttttcaagttgacatgtgtatttattgcacaaatatcccctagaactgggaggttattataatacaagngtacatttgagaaatgtatacagaacaagaaacagctatgtacatatccaacatctaagtaacttagaaaaagcagaacaatctcataagacatctaccagaagtaggcattatgtaaaatctgtttttttaagtgatcatccccagagtatgccaattggaacaaaacaaaatctgtactagtatgtttttattgcacttaacattttcaaactcaaaattaagacatattaataaaagccagaaatatttaaaatcaaaccaattagtttatatacaagaaaaaattagttttaattctataatgtaaaagatcccttttttatttcctgtttcaataaacaggttttttttgatatgtaacaactgtctgtaccataacttgtaaaaattatttagaacaagccaaaactcttttcacattcatcataatgaccacactttaaagtagcagcagctcattccttgggctttgcgtaaggaaagaatgactatggtgaaggtaatagaaanttatngaaggatnnggatttacaaactcaggattgggaaccgtggggaggaacaaacaataacttaggaatcctttagggtttaggttttttaagaaacatatggaatttccttcccacaaagttacttttggaccaaattcttgggccccctttt

SEQ ID NO: 269 - DNA, 484 bp, Homo sapiens
  modified_base (10)..(11): a, c, g, or t
  modified_base (138)..(138): a, c, g, or t
  modified_base (166)..(176): a, c, g, or t
  modified_base (179)..(180): a, c, g, or t
  modified_base (265)..(280): a, c, g, or t
  modified_base (282)..(283): a, c, g, or t
  modified_base (441)..(441): a, c, g, or t
gcggccgccnnctactactatacggctgcgagaagacgacagaaggggaggatgaggcaccattccaggagaaagattccggcagcgatgaagatttcctaatggaagatgatgacgatagtgactatggcagttcgnaaaaaaaaaaaaaaaaaaaaaaaaaaannnnnnnnnnngannaaaaagaaaaggaaatgcccaaacccagactaaaggctacagtgacgccaagtccagtgaaaggcaaagggaaagtgggtcgccnnnnnnnnnnnnnnnnannatacggctgcgagaagacgacagaaggggaggatgaggcaccattccaggagaaagattccggcagcgatgaagatttcctaatggaagatgatgacgatagtgactatggcagttcgaaaaagaaaaacaaaaagatggttaagaagtccaaacctnaaaaaaaaaaaaaaaaaaaaaaaaaaagtcgtatcgatgtcga

SEQ ID NO: 270 - DNA, 862 bp, Homo sapiens
  modified_base (151)..(151): a, c, g, or t
  modified_base (646)..(646): a, c, g, or t
  modified_base (693)..(693): a, c, g, or t
  modified_base (702)..(702): a, c, g, or t
  modified_base (710)..(710): a, c, g, or t
  modified_base (716)..(716): a, c, g, or t
  modified_base (718)..(718): a, c, g, or t
  modified_base (721)..(722): a, c, g, or t
  modified_base (724)..(725): a, c, g, or t
  modified_base (737)..(737): a, c, g, or t
  modified_base (744)..(744): a, c, g, or t
  modified_base (746)..(746): a, c, g, or t
  modified_base (753)..(753): a, c, g, or t
  modified_base (767)..(768): a, c, g, or t
  modified_base (772)..(772): a, c, g, or t
  modified_base (774)..(774): a, c, g, or t
  modified_base (781)..(782): a, c, g, or t
  modified_base (784)..(784): a, c, g, or t
taattaaaaacttttttttggaaacctttgggaaaattttttttttttttttttttttttggtcaagcttgaggctgaataaagcctttgatgcacaaaatgggactgctgaagagtggacagttggaccttactttggtgaccccatacntttgtggtcacatgctttagccatacacatggtaacattgactatggagtcttgtgaaagtgtaatgtgcgatggctatgtagacataaagaagaaacttgtaaatatcttttttcttttttttaatgtttctgatttctgaagtgcttgtatagcttttatctgcggctttaaactgacagtacccgactgtttattggatctattgatttgaaaagaatttgttaggatagatcttaagcagtaatctgtcagtgtttgtatttgtattctctgcaattttactgtgaaaaaaaatttgttttcaacaattggtgtcattttcttgatgtcactatttgttggagagttaaatggtctcttccctttgtgtatcttacctagtgtttactcctgggcacccttaatcttcagaggtgctaaattgtctgccattacaccagaaggatgcctctgataggaggacaaccatgcaaattgtgaaatagtcctgangttcttggattactttacacctcagtattgatttgtcccagaatttnctggccttncatggcantgaaantnttnngnngaaagatttaangtatttnanttttaangagtgtgttataannatantngtactgnntnctttatcccattttatcatcctttcagtttttattaatctactgtatcaataaaattctgtaatttaaaagagaaaaa

SEQ ID NO: 271 - DNA, 957 bp, Homo sapiens
  modified_base (18)..(18): a, c, g, or t
  modified_base (118)..(118): a, c, g, or t
  modified_base (126)..(126): a, c, g, or t
  modified_base (157)..(158): a, c, g, or t
  modified_base (182)..(182): a, c, g, or t
  modified_base (226)..(226): a, c, g, or t
  modified_base (256)..(256): a, c, g, or t
  modified_base (264)..(264): a, c, g, or t
  modified_base (272)..(272): a, c, g, or t
  modified_base (278)..(278): a, c, g, or t
  modified_base (283)..(283): a, c, g, or t
  modified_base (286)..(286): a, c, g, or t
  modified_base (290)..(290): a, c, g, or t
  modified_base (306)..(306): a, c, g, or t
  modified_base (309)..(309): a, c, g, or t
  modified_base (368)..(368): a, c, g, or t
  modified_base (887)..(887): a, c, g, or t
agcgctttggaaagacanaatctagaacactactagcagacaaaaaattacctgcaactggatagcgtaagtgcagtatagcgagacaaaacatatattcatatgttggcttgtttangcctcaanccctcgaccctttgttgagatcccataattnnattcctatgattttaataactcangttccaggaggactataagtctaatttgtactccaaaccaaacngcagtgcagttcgctactactgaggctgantctgtacngacttcangaccangtccngangacngttattatctaaaaantanttacttgaatacatagatgatccttcagagattttacctataacctatttcttgatganggttatttaatgcactggagataactgtgacttactgatcaaatacttgaatacttatacttacctgggatttcatttctgctgaaagaaataggaagaacaggactcacttaaaaaaaaaaaaaaaaactttagaaaggaaggtaaaaatcttacacacactatcacttttggaagcagcatagaaggggcagtcaagggtaaaacactggtgaaacaggtcaaaattaggaaaaaaaaaaaaactatattattatcaatgacagtaccacaactgtgcccttgataattagtaatcactcctaaaaatcttcatttggcaccagatggtgtgtttaaaacaccctaggatgttttgaatcaggcttgattttgttagttgagttacaggagaattttaagggtgagggtatgggggtcagggaagaaaaggaaatgggaaatggaccagaaaaaatcttgagtcatcatctaaatcaacaaagcactgatagctccaaatattaggtcagacactanaacgactgatataggctcaagtggtttataaaacctataaaaagactacaccagcagagtccctgtcaat

SEQ ID NO: 272 - DNA, 485 bp, Homo sapiens
  modified_base (10)..(10): a, c, g, or t
tttttttttngcagtttttcctgtttattatatagttattctaaggtggtaagtgtcacaaagttaacttcaagaggaataacatggtccagtgtgaaacacaaggtacaacattttacaatgaaaccacagcacaaagtaactgaactttcaaaattgggtagttcaatgaaacattttgtcaacccttagctctataaagctctgctgatggacttagttgatggatttaaaaaatatattgctgtgtcaaatgttttaacacaaaatgtttttttttaaagagaatacacatccaatcaactgaaactgtgagcagaaagtatgtaacctctttataaaaacgttatccaaatttacaacattcataatatatttcaaagtaaagagttcttagaaaaaataaactcaattccttgcttactgatgagtatcaactcctcaaaaacacatcacagaaagttaactttcatacttctttgcct

SEQ ID NO: 273 - DNA, 685 bp, Homo sapiens
  modified_base (3)..(8): a, c, g, or t
  modified_base (19)..(19): a, c, g, or t
  modified_base (487)..(487): a, c, g, or t
  modified_base (520)..(520): a, c, g, or t
  modified_base (572)..(572): a, c, g, or t
ggnnnnnnttttttttttnttttttttattggtgtagttacgaagcctttcaggctgcttctgtttaaaatataaaagaaaactttgccccctttgcatcttcataaacctgctgcggcagactcctcagccgatggtggctctgggtttccttgagtgtcatatgtcctagaaagttgctggctgactcttttttgtctggggcctggggaaagggcttggactgtgaaaagaaatgtggcccctttccatcttcaagagagatggaattaatgatggatggaccctggagggaatctccccagccgacttccactgggctgacagactttgctgaccacaggggaacgatgttcttttctttcttcatgatcagacataaacttagcatcttaatggaagaaaaatgaggggaacttcaattatgatttattaaagacaatttctattacaccctcctttatgacaagtgacattttagatgtanaagtaaaaactttaccatgcctttttttttttngttggcctaacattgaggccttaaaacctgaggctcctgtgcctgatggaantcttgtaacatacacttgtgtatcatataaagataccactctgtttctcttatgtattcttactctagttgtttattaagaatgacaagcacgtcttttcaaaaaaaaaaaaa

SEQ ID NO: 274 - DNA, 570 bp, Homo sapiens
  modified_base (75)..(77): a, c, g, or t
tttgtttttttttttttttttacaccataaagtgattattaagctttcctttttactctttggctagcttttttnnnttttttttttttttttttttaattatctcttggatgacatttacaccgataacacacaggctgctgtaactgtcaggacagtgcgacggtatttttcctagcaagatgcaaactaatgagatgtattaaaataaacatggtatacctacctatgcatcatttcctaaatgtttctggctttgtgtttctcccttaccctgctttatttgttaatttaagccattttgaaagaactatgcgtcaaccaatcgtacgccgtccctgcggcacctgccccagagcccgtttgtggctgagtgacaacttgttccccgcagtgcacacctagaatgctgtgttcccacgcggcacgtgagatgcattgccgcttctgtctgtgttgttggtgtgccctggtgccgtggtggcggtcactccctctgctgccagtgtttggacagaacccaaattctttatttttggtaagatattgtgctttacctgtattaacaga

SEQ ID NO: 275 - DNA, 682 bp, Homo sapiens
  modified_base (412)..(412): a, c, g, or t
  modified_base (500)..(500): a, c, g, or t
  modified_base (514)..(514): a, c, g, or t
  modified_base (522)..(522): a, c, g, or t
tggttgttttgaaaaacccccatatttttgggaattttttttttttttttttttttgataagttggtgtaaggctatgtgacttgatcaaaacagatgcagggcctctaaataaaagggatcatctgaaattaatgttgtttgaaattactatctgattttgagggttccagtatttctgtgaaaattcaacaagaactccttggaaactggtattgatattcagtctccttaaggtagatttttcaagcttttcatacattggaactccacctgactttggaccaaccccagaacagagcagagccacctcctatagacgcccattgccctgctgctgtacacttcagcagcttgcacaagggagctcacttaaaaggagaaattgtgtagttttaaaatatattttgtgnaaaataccttactatgctataaaccaccattaaaaaccagtgttttgatttggtacttaaatatttttggagtgaaaattatcactanagtaacatgactcncaacaaangtatggtttcattataaaagagtactgtattgatttgcccaagttttgtaacttagtaaaggtattaacttccttggatttgtactttgtgatttagtatgctgtatcgtgggctggttatgttaactgaaaaaaataaagtcattacctgagttttgca

SEQ ID NO: 276 - DNA, 500 bp, Homo sapiens
  modified_base (4)..(4): a, c, g, or t
attngtgttctgggtttttttttttttttaaccaactcaatatgtgtttgatgatagtgaattgataaaacccgaagcttttccctgtaaatcttacatctttgcctttaaagaatgggttacaaccatcactagatcacagtagtgcctaatgaaggttgagaaccgtaggagaggctctcatgctgtaaataatgttgcaggctaataacctttcatcacttcctttgtgcgcttcctgccttaagtgacaagtagcaacatggcttgggtcccctgtgcagcatcagcttatgctgccacaagtcagtttgcaccctaggtgcccaggagctagtatccttagatctttctatcgctaacttaattctcttcgttatttatctgaccctctaactccatgtctaacttgcattaaaaaaaaaaaaattctttacagtcaacccaagcttaacatggactcaggttccccagcagccttaatttgttttgttaccatc

SEQ ID NO: 277 - DNA, 405 bp, Homo sapiens
  modified_base (12)..(15): a, c, g, or t
cacgaggttttnnnntgcttggtaaacgaaaagcaaacttctttattgtacacagtacagaatataacgcagcttggcaggatgcatacggccctgcgcaggggaaagtatttcaaatcagctggcaggttcaagcctttctgcactgtagactttccacactctggaaaagaagcaaacaaacaaaccccaaagaacccccgaaaaaaacaaaaaccatccgggaggtgcatgagtccaatgggaatgcaaccgtgatgccgctgtcctatgcccagtgacagcacaggtcacgtaagttacagcaggggaggggtagctcaagctacagaggattattgtcatattgctaagacagcataaatccattcaaaaaaaaaaaaaaaaaaatccaaaccagggtaa

SEQ ID NO: 278 - DNA, 793 bp, Homo sapiens; identical to SEQ ID NO: 67
  modified_base (618)..(618): a, c, g, or t
  modified_base (632)..(632): a, c, g, or t
  modified_base (661)..(661): a, c, g, or t
  modified_base (678)..(678): a, c, g, or t

SEQ ID NO: 279 - DNA, 588 bp, Homo sapiens
  modified_base (8)..(9): a, c, g, or t
ttttttanntttaaaatacatttccatttttaatttaaaaaataaataacagcaaatctgaacaaaattttcctacttcaatgcacatcttcctaactgtccatgtttgaaatccagatagcaacaaaatcatggcaaaggcatttttgacaaagtttagacaaacgactcacaaaatatggctaatagtagatgagtttggacatctgatactgcagaccagccttggctagatcctaggcgtcagagtgaaatcatgaatttccttttgtagattagaattgatggtccaactctcaacccaccaaagagaaacttaccttttccaatttaattgtaaaagccagatatatcactgaatgaaggtatctaaggaagtgatatttatcaacttcccaaatgatacagagaaggaaagcataattattaaaatgaacctaaagtctagatacagtgggccaggctggtgaagccttagactactatggaaatgacattgtttataagatgttgcacaaattatggtaatctgtgtcaatatttcaatgtgtgctggattattactgacatattcataattttaatgtc

SEQ ID NO: 280 - DNA, 703 bp, Homo sapiens
  modified_base (457)..(457): a, c, g, or t
  modified_base (459)..(459): a, c, g, or t
  modified_base (464)..(464): a, c, g, or t
  modified_base (467)..(467): a, c, g, or t
  modified_base (471)..(471): a, c, g, or t
  modified_base (479)..(479): a, c, g, or t
  modified_base (481)..(483): a, c, g, or t
  modified_base (485)..(485): a, c, g, or t
  modified_base (490)..(490): a, c, g, or t
  modified_base (495)..(495): a, c, g, or t
  modified_base (498)..(498): a, c, g, or t
  modified_base (514)..(514): a, c, g, or t
  modified_base (517)..(517): a, c, g, or t
  modified_base (530)..(531): a, c, g, or t
ttttttttttttttttggataactcagtttcagataaaccatcttggttactgtgcttaatttggaccaaattttatttagcttaatatggacactgacacattttggggggtatacattagacatatcagagcagtgtatttctggatcattttttaaatgacctcttctaaaacataactgtcacttacctgaaatgctgcatcctaaaattccaaaattatattgagcaatcgccaaggcctaaagccaactgacttaaaggtaatcatttcagctaagattaaatttaaagcctaagaatgtatagagctagttttaaaataatgatctcagatttttaaaaaggatataggaacctgcattgtcattctctgaattaagaactgatggtttctatcattatttagccccacctttgtattttaaaatccttcagaatacatttatgaaccanantgcgnacntggnacttagcncnnnancacanatggnaanattcagaccttgactnatnttggtgtttccannttcacaaaggtgatgaatgactgtcttgaggagcagcttaatccgcacactatttgtcacatttcttgctgctcctaggctgtgtgaaacttactgtgaaccatctaccatatacattgggtcctgtccaattctactgaatgggggtggacctggctattttatctggcca

SEQ ID NO: 281 - DNA, 450 bp, Homo sapiens
  modified_base (411)..(413): a, c, g, or t
  modified_base (417)..(418): a, c, g, or t
ttttttttttttttttttttttttttcttatcaaaaatattttatttacaaaaaattaattatactatacatcctatactggaaatacattgaataattgctaaaataaatacaggcaattaattcaactttttataagaatgagagaatttgacatttgaatgttatcaaagcttaacttagaacataaatagttaaaaaggcaaactcaagttttcatctcatttattggcatggtgtgttttgttttccacaagctctccaatcagtgagagtcttgagtctcagatgtacctttttgtactctgaaggtaggatgtgcagctttttcttaggcaggatagatgtaacatagatgactgcataaaaaagaggcagaaaggcaggaagcccattttttttttaacactnnnccanntgtctctgcctcaccataatgctgtttattca

SEQ ID NO: 282 - DNA, 483 bp, Homo sapiens
  modified_base (427)..(428): a, c, g, or t
tttttttttgccttcaactaaaaacaaaggagataaatctagtatacattgtctctaaattgtgggtctatttctagttattacccagagtttttatgtagcagggaaaatatatatctaaatttagaaatcatttgggttaatatggctcttcataattctaagactaatgctctctagaaacctaaccacctaccttacagtgagggctatacatggtagccagttgaatttatggaatctaccaactgtttagggccctgatttgctgggcagtttttctgtattttataagtatcttcatgtatccctgttactgatagggatacatgctcttagaaaattcactattggctgggagtggtggctcatgcctgtaatcccagcacttggagaggctgaggttgcgccactacactccagcctnngtagtccagcctggtgacagagcaagactccatcttcgtaagagaattatagatc

SEQ ID NO: 283 - DNA, 416 bp, Homo sapiens
  modified_base (379)..(379): a, c, g, or t
  modified_base (382)..(382): a, c, g, or t
  modified_base (389)..(389): a, c, g, or t
acatcaactaaagtagctaagctactgtaatgatttgaaagtttgttatgagagaattatgctttgtcaagccaactataaggcagctttctacaacagttctgcaaaatgtttccaccacattgagcaaagctgacactagacactagctacacgtgggaataggaagatgggccaggctcagagccgccgcaaaggatgaagtccactcagatttgaggcaatcctggggcaaagcactgagcaaagcaacttctctggtaatctcctcctcagccattctctacccaggatttcagaacacagaacagaagaaactgcaaaagccctgcaggatatatcacagctgttaacattctgactttaaaaaaaaaaaaanaangaccganttatcggtgaaacctggctcaaagacc

SEQ ID NO: 284 - DNA, 504 bp, Homo sapiens
tttttttttttttttggctgtgacctcttcaaaccgtggtacccccccttttctccccacgatgatatctatatatgtatctacaatacatatatctacacatacagaaagaagcagttctcacaatgttgctagttttttgcttctctttcccccaccctactccctccaattcccccttaaacttccaaagcttcgtcttgtgtttgctgcagagtgattcgggggctgacctagaccagtttgcatgattcttctcttgtgatttggttgcactttagacatttttgtgccattatatttgcattatgtatttataatttaaatgatatttaggtttttggctgagtactggaataaacagtgagcatatctggtatatgtcattatttattgttaaattacatttttaagctccatgtgcatataaaggttatgaaacatatcatggtaatgacagatgcaagttattttatttgcttatttttataattaaagatgcca

SEQ ID NO: 285 - DNA, 832 bp, Homo sapiens
  modified_base (266)..(266): a, c, g, or t
  modified_base (268)..(268): a, c, g, or t
tccacttgtaaaatcattttattggtataaatatacatatgaataaaatacttccagcctgtaatgtaagtgaatatttgtgaaatgtcttataaagagtagtattttgatttttacaggtgtcaaagtattctctcttaaaatcacacattaaaagctaatatgcagacagaaattaaaggccttcaaaaacatgaatattcataaaacctcattccaatcaactatatacattaatctgggcacatggtaaaatcagccatggncntctctcactctgttcttagctgtgctcgttgatggtatgcaaaggtcaccgaccaagctttaaatgtacaattccacatcaggaaggaagaagttccccatgggagaaggtaaaaaccatacccaagatctaatatatataatctatacaaattattagtgtgctctgttaatataattacaatgtgcaattgcatacatcaagaataaattgctatattgagtcctgtgcggatttgacacaggtacacttagcagtactccgaggtctgctgtggtgttacttgtgtgagtgtgtgtccagttatttcatttatctccaaaaactcatcttgcagggcaatctgtagctgcctcagataaattcaagtagggcccatgggataattgctggctttcattaaaggcatatgaaggaatgtttagaaatcaaatgcaaagggttggaggaagaccaaacaaatgtgctttgattaccaagaaatggatctgtttctatacaaaaaaaaaaaaaaaaaaaaaaaaagggggggggtttttgggttttcgggggcccccgccccaa

SEQ ID NO: 286 - DNA, 687 bp, Homo sapiens
agatgctagtactttaatccaggtatagcagtttcccgttattttcttgcttgtcgttcccctacatttcttcctgatttcccaagactctctttgtggcttttgagggtcagccaaggagcaggcaagtgagtgaacaatcctcaggaaaagaaggaccattttagcttaacacttcctttttttttttttttttttaagaagaatataggtaaacaggtaatgattcttgattggagataccatttgactcttgatgagagttgtacgaagatggaaatgagggatgattccaggcgttttagggggaaggctgcagataccattctaacccccaagatactgtgttctcaagacctcttagaactaggtgttgtcagggataatttgaggagggcttagtcttcagaacaatcctgcagtcttgacagaaatctaaaatctccaaaaactcctaccctttaaccttaccctagggggaactgatctatgaatattacatgtgtgattatgaaaggtgaagttgagtgagaggagttgaggaacgtggaagacagtgagctctcaccctaacactataagaagcatgatctcaatagaccaataattcacctttttatacatctgtaaataaatggaatgtttttaagaatataattatgtcagatttagcattttcttttatat

SEQ ID NO: 287 - DNA, 744 bp, Homo sapiens
  modified_base (442)..(442): a, c, g, or t
  modified_base (444)..(444): a, c, g, or t
  modified_base (448)..(448): a, c, g, or t
tatttttttcttgaatgtgcttcgcaagccaggctatcttccaaggaaggcagacagtgggagagcagagggactgactgcaggcaagcacattgaagaaagacactggcgggtttccccaccctcaccccaaagcagaaaactagcagacgtcagctcagccccgtcctgggcacagacactacacaaggagacgctggaagttaagcaatactttaatactgtaatatgtttgttttctttttctttcttttttttctaccaaaaaaaagtaagtaaactaaaacacaaaaacatataaataaaatccatccctcttgtcggggacctgcaggggggcaaccttaatccaaacacctggctatcaaataatcagaatgtattgtctcagacaggatttcagttccgggaggcaggggcatgatgggggagggggccggangntganagacaaaagttccagagcctccctcgaaggttctctactactgtattctgtacataatgtaccatcccatgtggaatctgtgagtgtcctcttaagtagcgtgggctagccaatctgccgttcatggtgtattgtaaactccgaattccatatgtaataggatgcaagtctaagcgtttcatgtggacataaatgtatctaaataaaactttccctagcactgtggctgacctcacccttacttttatactttagtatgaaactgatgagaacttggtagtgagtattttttttat

SEQ ID NO: 288 - DNA, 468 bp, Homo sapiens
  modified_base (6)..(7): a, c, g, or t
  modified_base (409)..(409): a, c, g, or t
ccccgnntttttttttttggttttttttttttggctcatgaatttttctgtttgtcatggaaatgtaagagtggaatattaatacatttcagtttagttctgtaatgtcaggaatttttcaaaaaaattaaaagatggactggagctttttctttgtgaatagaaactggatgccacagtgattcatgtgggttttattcctcttgtcttgctgttatttttgtaccttttatccctcaaaggacccttcttgggttttgaatggaagcctttattccggttaagatgttttcttctattttaccacttccatctttttttgtggccctcgatcctatttttccctgactccatgcttggttggcccttataaaacttgtgcccaaaagattgaggattagactttccnaggacttacctgtcctaggggagtaggcaagcacttccactagggagggggtgggggaa

SEQ ID NO: 289 - DNA, 475 bp, Homo sapiens
  modified_base (156)..(157): a, c, g, or t
ttttttttttggttttaaagttctcttaggtataacttacataaacgttaataaatcttagggtacaccttggtgaattttgtatatgtctatacccaccacggtctccatcaaaatattttatcgtcccagaaatttcccttgggccccacctcnncctcaaaggttatcactattctgatgtctatcaccatagatttgtttttcctgttcatgtaaatggaaccataaacagccctcttgtgtctgttttcttcacttaatatagtgtcattgagatttatctatgttgtattatcagtagtttatgctttttaattgctgtgtaatagtccatagtctgaatataccacaatttaaaaattctattctgtttacaaacatttgagttctgtcctccaggttcatccatgttatcacaaatgacagaatttccttcctcatcaaggctgaatagtattccattgtgtagata

SEQ ID NO: 290 - DNA, 708 bp, Homo sapiens
  modified_base (495)..(495): a, c, g, or t
  modified_base (515)..(515): a, c, g, or t
  modified_base (593)..(593): a, c, g, or t
  modified_base (626)..(626): a, c, g, or t
  modified_base (628)..(628): a, c, g, or t
  modified_base (631)..(631): a, c, g, or t
  modified_base (638)..(639): a, c, g, or t
  modified_base (662)..(662): a, c, g, or t
  modified_base (672)..(678): a, c, g, or t
  modified_base (680)..(681): a, c, g, or t
  modified_base (684)..(684): a, c, g, or t
tttttttttttttttgtaaatttgagacttatgtaagcgtgatttcaaaccataattcgtgttgtaaatcagactccagcaatttttgttgtatgattttgtttttttgtaaagtgtaattgtccttgtacaaaatgctcatatttaattatgaactgctttaaatcactatcaaagttacaagaaatgtttggcttattgtgtgatgcaacagatatatagccctttcaagtcatgttgtgtttggacttggggttggaacagggagagcagcagccatgtcagctacacgctcaaatgtgcagatgattatggaaaataacctcaaaatcttacaaagctgaacatccaaggagttattgaaaactatcttaaatgttcttggtaggggagttggcattgttgataaagccagtcccttcatttaactgtctttcaggatgttccttcgttgtttccatgagtattgcaggtaataatacagtgtattcatanagaatctcaatcttggggcnaaatgccttgtttctttgcacctcttttcaagtccttacatttaattactaattgataagcagcagcttcctacatanagtaggaaactgccacatttttgctatcatgantngcntgggccnnctgctgttcctagtaagatattntgaattccannnnnnnannaangcttgagttaacaaacaagaaact

SEQ ID NO: 291 - DNA, 873 bp, Homo sapiens
  modified_base (28)..(28): a, c, g, or t
  modified_base (56)..(56): a, c, g, or t
  modified_base (63)..(63): a, c, g, or t
  modified_base (137)..(137): a, c, g, or t
  modified_base (139)..(139): a, c, g, or t
  modified_base (143)..(178): a, c, g, or t
  modified_base (186)..(186): a, c, g, or t
  modified_base (188)..(188): a, c, g, or t
  modified_base (192)..(192): a, c, g, or t
  modified_base (194)..(196): a, c, g, or t
  modified_base (649)..(649): a, c, g, or t
  modified_base (680)..(680): a, c, g, or t
  modified_base (685)..(689): a, c, g, or t
  modified_base (691)..(694): a, c, g, or t
  modified_base (696)..(696): a, c, g, or t
  modified_base (747)..(747): a, c, g, or t
  modified_base (750)..(762): a, c, g, or t
  modified_base (764)..(764): a, c, g, or t
  modified_base (766)..(766): a, c, g, or t
  modified_base (768)..(768): a, c, g, or t
  modified_base (770)..(770): a, c, g, or t
  modified_base (772)..(772): a, c, g, or t
  modified_base (774)..(775): a, c, g, or t
  modified_base (779)..(780): a, c, g, or t
  modified_base (784)..(784): a, c, g, or t
  modified_base (788)..(788): a, c, g, or t
  modified_base (791)..(794): a, c, g, or t
ggccagggtgcaaggagaaaggattttnaggaggggactccatggcttccgagttnctgactnaccctccacctcagaggtagttctgacactgtctcagttttgcagatgaagatgagattcttcagttctccatntngaannnnnnnnnnnnnnnnnnnnnnnnnnnnnnnnnnnnaagcagcngnggancnnngccgaccgctgtaaggaggtacagcagatccgcgaccagcaccccagcaaaatcccggtgatcatcgagcgctacaagggtgagaagcagctgcccgtcctggacaagaccaagtttttggtcccggaccatgtcaacatgagcgagttggtcaagatcatccggcgccgcctgcagctgaaccccacgcaggccttcttcctgctggtgaaccagcacagcatggtgagtgtgtccacgcccatcgcggacatctacgagcaggagaaagacgaggacggcttcctctatatggtctacgcctcccaggaaaccttcggcttctgagccagcagtaggggggctcggcctgggagtcggggggccccggtcaggccctgcccagagagctcctggttcctgaactgagctgcctctaccgtggtgggctgggcaggcatgtgcccccctagncagagggcaccaacccacctactctgccccngggtnnnnncnnnncnggtcgtgttagggttgtccctctgggtgctggctggtgggatgggggaggntgnnnnnnnnnnnnnancncncntncnntgtnnttcntctnttnnnnaggcaagtaatactttcattatgtgtctgtttttattaattatgtcaattgatgtcttttcattgtcatatatcgcact

SEQ ID NO: 292 - DNA, 1370 bp, Homo sapiens
  modified_base (7)..(7): a, c, g, or t
  modified_base (12)..(12): a, c, g, or t
  modified_base (65)..(65): a, c, g, or t
  modified_base (153)..(154): a, c, g, or t
  modified_base (156)..(159): a, c, g, or t
  modified_base (161)..(161): a, c, g, or t
  modified_base (189)..(189): a, c, g, or t
  modified_base (366)..(366): a, c, g, or t
  modified_base (752)..(752): a, c, g, or t
  modified_base (770)..(770): a, c, g, or t
  modified_base (774)..(777): a, c, g, or t
  modified_base (784)..(784): a, c, g, or t
caatggnagccntaggactgacagcatcagaagaatttatcaagatcacattgtcagcttttgangcaataatacagtatcctattttattgaaagactatcgctccacggttgttgactatatactgccacccttggtgtccttggttcaanncnnnnangtggagtggagactctttagcttgcggntgctctcagaaaccacatctctactcgtgaaccaggagtttggggatggcaaggagaaggccagtgttgattctgacagcaatcttctggctctcattcgagatgtcttacttccccagtatgagcacattcttttagaacctgacccagtaccagcatatgctctgaaactgctantcgcgatgactgaacacaacccaactttcacaagacttgtggaagaaagcaaactgatcccactcatttttgaagtaactctggaacatcaggagagcattctgggtaataccatgcaaagtgtgattgcattactcagcaatctagttgcctgcaaagattcgaatatggaactactttatgaacaaggacttgtcagtcacatctgtaacctgctcactgaaactgccacactgtgcttggatgtggacaataaaaacaacaatgagatggcagctccactgctcttttccctgcttgatattttgcacagcatgctgacctatacctccggtattgtacggctggctttgcaggcccagaagtctggctcaggagaggacccncaggctgcagaagacctnctgnnnntcaacanacctctgacagacctgattagcctgctcattccactgcttcctaatgaagatcctgagatttttgatgtttcatccaagtgcctgtctatactggttcagctgtatggaggggaaaacccggacagcctctctcctgaaaatgtggaaatttttgctcatttactgacatccaaggaggacccaaaggagcagaagcttctgttaaggattctcagaagaatgatcacctccaatgagaagcacttggagagcctcaagaatgcaggcagcctcctgcgggctctggagcggctggcccctgggagtggttcatttgccgacagtgcggtggctcccttggccctggaaatcctccaagccgttgggcactaggcaagaaggtgcttagcacaagcccgccctgtggccccagccctcggatgcataagcaaggtcagctcccagacacctttgccacatcccctcacagctgtctttggacctaataaagtcagcttaacccagaaaaaaaaaaaaaaaaaaaaaaaaaaaaaaaaaaaaaaaaaaaaaaaaaaaaaaaaaaaaaaaaaaaaaaaaaaaaaaaaa

SEQ ID NO: 293 - DNA, 1921 bp, Homo sapiens
  modified_base (58)..(63): a, c, g, or t
  modified_base (65)..(65): a, c, g, or t
  modified_base (69)..(69): a, c, g, or t
  modified_base (73)..(73): a, c, g, or t
  modified_base (77)..(77): a, c, g, or t
  modified_base (95)..(101): a, c, g, or t
  modified_base (104)..(104): a, c, g, or t
  modified_base (106)..(107): a, c, g, or t
  modified_base (114)..(114): a, c, g, or t
  modified_base (119)..(119): a, c, g, or t
  modified_base (123)..(123): a, c, g, or t
  modified_base (129)..(131): a, c, g, or t
  modified_base (145)..(145): a, c, g, or t
  modified_base (156)..(156): a, c, g, or t
  modified_base (166)..(166): a, c, g, or t
  modified_base (208)..(208): a, c, g, or t
  modified_base (247)..(247): a, c, g, or t
  modified_base (295)..(298): a, c, g, or t
  modified_base (300)..(300): a, c, g, or t
  modified_base (470)..(470): a, c, g, or t
  modified_base (521)..(522): a, c, g, or t
  modified_base (535)..(535): a, c, g, or t
  modified_base (537)..(537): a, c, g, or t
  modified_base (681)..(681): a, c, g, or t
  modified_base (785)..(785): a, c, g, or t
  modified_base (792)..(792): a, c, g, or t
  modified_base (871)..(871): a, c, g, or t
  modified_base (893)..(893): a, c, g, or t
  modified_base (942)..(945): a, c, g, or t
  modified_base (948)..(948): a, c, g, or t
  modified_base (950)..(952): a, c, g, or t
  modified_base (955)..(959): a, c, g, or t
  modified_base (961)..(970): a, c, g, or t
  modified_base (972)..(977): a, c, g, or t
  modified_base (1280)..(1280): a, c, g, or t
  modified_base (1364)..(1364): a, c, g, or t
  modified_base (1373)..(1373): a, c, g, or t
  modified_base (1377)..(1378): a, c, g, or t
  modified_base (1380)..(1382): a, c, g, or t
  modified_base (1384)..(1386): a, c, g, or t
  modified_base (1388)..(1389): a, c, g, or t
  modified_base (1571)..(1574): a, c, g, or t
  modified_base (1582)..(1582): a, c, g, or t
  modified_base (1584)..(1584): a, c, g, or t
  modified_base (1591)..(1591): a, c, g, or t
  modified_base (1667)..(1669): a, c, g, or t
  modified_base (1671)..(1672): a, c, g, or t
  modified_base (1674)..(1674): a, c, g, or t
  modified_base (1676)..(1685): a, c, g, or t
  modified_base (1687)..(1687): a, c, g, or t
  modified_base (1689)..(1689): a, c, g, or t
  modified_base (1691)..(1691): a, c, g, or t
  modified_base (1693)..(1693): a, c, g, or t
  modified_base (1699)..(1700): a, c, g, or t
  modified_base (1702)..(1703): a, c, g, or t
  modified_base (1705)..(1708): a, c, g, or t
  modified_base (1752)..(1752): a, c, g, or t
  modified_base (1762)..(1762): a, c, g, or t
ccccccaaacttttttttttcttttttttctttttttttgttttttttttcttttttnnnnnncntttntttntttntttttttttttttttttnnnnnnnaanannttgtaancaaancttnaatccnnnggattctcacaaancatattacaantgacagcatnaaaaaaaaatcttgcacagtaactcaaagttcggctctacantgtacccttaaactggcaggacatttttgaaatcacaantttgcacataaagaatgtcacgaacagccatgtatccatatacagcannnnanataaggaacttatgacctaaagcaaaggtaaactttcttgaaacttaacattctataccaactaggcaacctctgcccaggatgagagttggatttttcaaaaacctctaatttaatagtgcagcatttcgttttccctgatggcctgtgtttcacagcagtttttaaanactgcttgttcaactatagctgcagcctatatcccagctatggaaaaaaanngtaaatcttagtncnaatttttgccagttgtttctgtatttaaatttaaaaaaaaacacacttccgctgggcaggtttagaggtttattatcagtctgtgcataactaaaagttcaaagcaaattcaattttgcttaagggaacattgtaaagtaacanttcttggtattacatgcctcgtatgatccatttcaaaccatagagaattacacctttgtgtcactgtttcaagagacaaacagatttgaacagctaaaacatcntaaaaantgcaccaagcttatgaagtctcaaacaaaacttgaattttctgtacatactcctgtcaaatgaagtaatttcctgtacnccacttctcttgcaaactgtcntctatttcctttcatttgacctagatcgactaaaaaaaaaaaaaaaaannnnaanannnaannnnntnnnnnnnnnntnnnnnnggtgacactttagtgacatatcgaaatagaactttaaggtaaaaaatttatggcttagaagacaggccttagcatactatgtatgcaaagtcttaaatacaagttatcaaagatcttacctacgagacctagagaaggatcgggacggcttgtgatttctctcccgagacagcgatctctctcttctcctatctctagaaagggacctaaacaagcaaaaaaacattaggaccaatgaggtatgataaaattatacataaatattttcttgatctggcatggtgactcatgccaataattccnatattttgggaggcagaggcaggaggctcacttgaagccaagagtttgagaacagattggacaacaaagtgagatcccatctcnacaaaaaanaaannannnannnanngcagtacttgcctgtagtccaagctactcaggaggctgaagagggaggatcactccaaggccaggagttaaaggctacagtgagctataatcacaccactgcactccagcctgggtgacagatcctttttttaaaaaattaaatactttctaaaaagcctttgaaaactcaaagaaagctgnnnnatccttanancttgatncactattaaagccaaggtttattcccattaactaagccacctggaaaagtttaggaatagcagaaacactgccatnnntnncntnnnnnnnnnnancncnanaaaggnngnnannnncctgctccggctgcgagagaagcttctccttcttggagatctanaagcagaaanaggaaaattaggctcatcatcaattagtatttatggcgtgaggcatttcccaacttttcaatctcactgttgggcccagtgaatgtgccgaagaactggcacccatcgtccaaaaaaaaaaaaaaaaaaaaaaaagaaaaaaaaaaaagaaaaaaaagg

SEQ ID NO: 294 - DNA, 833 bp, Homo sapiens
  modified_base (61)..(62): a, c, g, or t
  modified_base (64)..(64): a, c, g, or t
  modified_base (66)..(68): a, c, g, or t
  modified_base (70)..(70): a, c, g, or t
  modified_base (72)..(75): a, c, g, or t
  modified_base (77)..(81): a, c, g, or t
  modified_base (83)..(83): a, c, g, or t
  modified_base (85)..(87): a, c, g, or t
  modified_base (89)..(90): a, c, g, or t
  modified_base (92)..(96): a, c, g, or t
  modified_base (98)..(98): a, c, g, or t
  modified_base (102)..(104): a, c, g, or t
  modified_base (251)..(251): a, c, g, or t
  modified_base (314)..(314): a, c, g, or t
  modified_base (325)..(326): a, c, g, or t
  modified_base (343)..(343): a, c, g, or t
  modified_base (348)..(348): a, c, g, or t
  modified_base (350)..(350): a, c, g, or t
  modified_base (354)..(354): a, c, g, or t
  modified_base (362)..(362): a, c, g, or t
  modified_base (368)..(368): a, c, g, or t
  modified_base (387)..(387): a, c, g, or t
  modified_base (401)..(401): a, c, g, or t
  modified_base (404)..(404): a, c, g, or t
  modified_base (486)..(486): a, c, g, or t
  modified_base (636)..(636): a, c, g, or t
  modified_base (697)..(697): a, c, g, or t
tttaaatgctggaaaaagtagatatttaatgaaaaatggattaggtactataaaaaaattnnantnnntntnnnntnnnnncntnnntnnannnnnanattnnnttcttctgtttcattaaacactcccaagtcttcaagttctctcattcgctgtctacgcatcttcttcatgtcatccattttttgaagtacagcttcagcagtgttagttataagtttgtcaaacagcatggactggtttacaccacntataacgacttctaatcctacaacttcgacgcacttcaacatcaccattatcttcatgtaagntgttctgtacnnttgaacgatgtttctangcccncnatgnaccgagtnactggnatcactttgtcttctctgngctcttcttttttnttnatcagcctgctgtctggccaactgccttgtaaaatgcctgccattagcaagttgctccgttatttccacattcttctcaaanctagaatctgaagaattctgtgcatcttttctcaaagatcttaaagcacgtgtccggtggtaggtttcaacttccttaactgatgacccatcgcccgctttggctgtggtcgccgcgggtttcttctgcgccgcgccggccgagcggagncgcctccggccgatgtgctccagactgaggaagtcactggacaggtccaaggagcccgtgnccgaggccgcggagtggttgtgcagctccaagctgctgcggagaaccaccatcttctctccctactggcctcggcgtgcgcgaccggagagagatccagctccaggcgctcgcagctctggctcttccgcgctccc

SEQ ID NO: 295 - DNA, 1424 bp, Homo sapiens
  modified_base (472)..(472): a, c, g, or t
  modified_base (479)..(486): a, c, g, or t
  modified_base (489)..(496): a, c, g, or t
  modified_base (500)..(505): a, c, g, or t
  modified_base (767)..(767): a, c, g, or t
  modified_base (998)..(998): a, c, g, or t
  modified_base (1006)..(1006): a, c, g, or t
  modified_base (1261)..(1261): a, c, g, or t
  modified_base (1389)..(1389): a, c, g, or t
  modified_base (1391)..(1392): a, c, g, or t
  modified_base (1395)..(1396): a, c, g, or t
  modified_base (1413)..(1414): a, c, g, or t
  modified_base (1421)..(1422): a, c, g, or t
taataatcaataatttcttattttaaaaagtagtactatttaatataatcaagataggagatttaaaatgagcaagtgattcatttgctcttttaaagaagcccgttgacttacgcttttaaaaaagaagttggtgggttacctcaattattgttcatgcttaaacatatccatttgtacaggcttatttctacgtgggacccaatcatatatactatatttctcaaataatttttctaaaactctggcctatattctaaacacttgaccaacaccttagttattgaataggtaaccatttttaaagtacatgtggttcattttttaaaattcaatctctcaagaccgttagatatttaataatttaagctgataagggtatcaaaatgcacattaactttgatcatcatgatttaagttgtaactttgtgttattatataaatattaggttgtttataaatatattgcagnaaagtannnnnnnnaannnnnnnnaaannnnnngactgtggtttagagttatatatttttgcttatttttaaacttcaattattccattcttctgccttataataaaacttttaaggcagagaactgaactaattatagaatttctcctttggagagttataatgttacatagtgaacattcttataaaagaaagaataagtttaagttgatgaatatttagctgcaaagattttttacttaaaaaaatccatgaatatctttgattttattataaagcatttgtaaattatttncatttgagctgtaagattcataaacatttacatttcccaatgatttctattttgatttttaaaaaatatacagggcaagctacatttttaaagcattaatcaacaactttattatattacacattccagtgcacaaacacacaatatcatttaatactcacagtagtacctgtgaaatatatcagatggatattcctatctctattttacagcagaggaaaccgaaattcngagaactnacatttctaaggttgtacagctgcaaaatgaccaaattgtgaagtccctaacatccaggttttcataatgccagtactctttctatgacatgtttatgaccctccaaatgtaccaaaactacctaactaattcactgagaggaagccaactgcaaaaataggatttttaaaagtacaatagagtattactacattttatggatttcagacaaagaaacctccgtttattatatcctgatggtgagtattgccagntctaaattattcatatttctaagaccaaggaaaatataggtaaatgaaaattttgaaataaagaacaatgccttaatttgtaaaatctatcattgctaccaccctgcccaggtctggccatttgccananntgnnggtaaataaatacaatnnctgatannaa

SEQ ID NO: 296 - DNA, 714 bp, Homo sapiens
  modified_base (2)..(2): a, c, g, or t
  modified_base (362)..(362): a, c, g, or t
  modified_base (455)..(455): a, c, g, or t
  modified_base (629)..(629): a, c, g, or t
tnacgcacacaaatgtatatttattagcaagaaaaggcgttcacaatatattgataaaagggaaaagttgaagtttcctgccagtttgtgagaggcagctgttgcttagtgatcaataattaagaacacacaggctgtgtggaggcagacacatggatccactaattcactgtgaccttgggttaattgttctaagcctcagtttagtcatctctaaaatggggataaaatagcatccctcatagctgtggttaagtgagattatttgcacattcaattgacaatatttattgaacatctctgtggcagggaaacaaatggttcctgccctctgagagcttccagtctagcaaaaaaaaaantcagaaatcccacacccgtattaaacataaaaataaattacagatgatggtacaagtgatcaaggaaaggtaatggatgtgatgaaactaacnaagggccctgacttgtgctgtcaagaagcctctgaagaagtgacatttaagatgaaacctaaaattatgagagaactgcagctgttacagccaaaggggaaatgatgacatggacaaaggcctcgaggcaggaggagctgctggcagccagctctcggcataagctttggcatncagtaagtgccttgcatactgctgtattgcaattgaaaaaataaggatctggccaggcggacatctgtcaaaccttcctagcaac

SEQ ID NO: 297 - DNA, 498 bp, Homo sapiens
tattttatgtgtggtccaagacaattcttcttccattgtggaccagggaagccaaaagattggacacccctgtctagggcaaggattccaaaagtatgttctgtataaaacttgcatagagattccaggaacacttgttcaaatgcaaattcctggtccagatctcaaagatcagtctctgcacgtttggacatttttaacaagcaaccctcatgatttttatgatccttaagtttgacaattctagggccttggtcttcaaaatgacacatgcatacccttgagaacacaccaacattttcccatgggggtaaggatacatgcatagctctatggaaaccaacttaaagatgtccaatttccatatgtgttgtcctaaaatatgtgctctgatgaggcctcttcagatctaccatttctctttacctcccttttcacaacagccatactccctatcctccaaaaaaaaaaaaaaaaaaaacgggcggcctctcaacc

SEQ ID NO: 298 - DNA, 719 bp, Homo sapiens
  modified_base (28)..(28): a, c, g, or t
  modified_base (32)..(32): a, c, g, or t
  modified_base (49)..(49): a, c, g, or t
  modified_base (74)..(74): a, c, g, or t
  modified_base (77)..(77): a, c, g, or t
  modified_base (148)..(148): a, c, g, or t
  modified_base (167)..(167): a, c, g, or t
  modified_base (184)..(184): a, c, g, or t
  modified_base (186)..(186): a, c, g, or t
  modified_base (693)..(693): a, c, g, or t
  modified_base (697)..(697): a, c, g, or t
  modified_base (699)..(699): a, c, g, or t
  modified_base (706)..(710): a, c, g, or t
gatcctcctgcctcatcctcccaaaatnctgngattacaggcataagcnaccgtgcctggcctctttaataatnttnaaaataccctaaaggcttgtgaatatacaagtctactgataaattatgtattgtctgggaatttgatagtnattgttttagataactggnttttacgctgtggtagncnggctgtgacactagtgttgcacaggtgtaattggtcatcctatgccttcaccagaataacttgggagtggtgccagaaactagagtctacaattctcactgtttagagagtgttaatgacatactgtgtatgcataatagccgcatgtactataatagcccttaaaattaaactattgggattgctgtaaatattttaaagtactggaggtgccttttacctgtttattagattttgaaaaggtttaaattatttcatgagcaatcttttaaatttcatttaacataaagctgaaaattcaataacaggataaaaaagctttttaacaaggctgccatttaacttaaatgtgttcatcttagctttcacttgtataaaatttgattctttgaactgcagcaataaaaccctcagctcctaagaagtcttaagagggtattctatatattctgctttgttttattttctgtaaattttgtaggtaaatatgtgcattaaaaataaatncttnanatataannnnnaaaaaaaaa

SEQ ID NO: 299 - DNA, 469 bp, Homo sapiens
  modified_base (394)..(394): a, c, g, or t
  modified_base (426)..(426): a, c, g, or t
tttttttatattccagtaaaactttatttagataaataaggagctagacagattttgcccatggaccatagtttgatcatggccaacctatgatctaaaccaaagtccctaggcaagttgcaatagaaaagttgtgtgagacagtgagattttgcctttgttattcaatggcaagctagcccatgctgacacagaaattggtcccttgttttttaaaatgctaaaatactgaacactggcttaatggttagctggcaggcattcaggaaattgctatcagaagatggaagaaataacttacacaagggtaatttatattatggaaaggtgaaactgccccttgagataacctgaaaggcagatcatctaccctttactaaagaaaaagacaganaaacaaaatattttgtagttgctgttcactgnacttgacaaaacgtacagaagagatgaactcagaaaagactgg

SEQ ID NO: 300 - DNA, 539 bp, Homo sapiens
ctttttttttttttttagaggctgtaaagacttttctttattgttcatttattctgttcccttatataagctaggtattaggctaggtatggaaatacaaaaaggaataagataaggcagctgccttcaaggatctcactgtctagggaaggggaaacacaaatatctcaacaccattgagtgagtgtgatgatagagatacgcattcagtcaacaaacatgtcctatgtgctgggtgctgtgctaggtgctgaagatacaatgaacgaagcaagcatggtccttgaattcaccgagctcctattcctgtgcccgcggctcggctcctcctcgctcgcgctgccccagccggggctgaggtaccgggccgggtccccggcgccccgagtctccgccccctcctcctcgtcctccaactcgtccacgtcctcggcctcctggatggcgacgcggatctgcaccgccgtcttgggcccgggccgagcctccccgccggactgggccatggctcgcgggactgcggcgccgccggggtcctc

SEQ ID NO: 301 - DNA, 508 bp, Homo sapiens
  modified_base (72)..(72): a, c, g, or t
  modified_base (413)..(413): a, c, g, or t
ttttttttaaatccaaattctattatttattgagtagtagccacaatcaagtcattgggtttctatgaaccncagtccatctcatataaagtgataatgatgatagctaacatgtactagcacttaatatacaccgggtaccattctaagggcctcaaatggataacataatttattcttcacaaaaatgttctgaaatgagaagtatgagtgtccctactttacagaagaggaaactgaggcatagagaggttagggaacttgggaatggtggagccaagaattgaactcaggcagtctgcctctggggatcttagcccatgtgtggtaacaatacttacctcaactatatcatagagtttctaggagttgcattagaaaatgagtataaaagcatcttttaaaccataatntattagtcttggaaatactgagcaagatgctgaatctcaagttgtaagctttttttttcttttctttttttatttagagacagggtctccctctg

SEQ ID NO: 302 - DNA, 387 bp, Homo sapiens
  modified_base (385)..(385): a, c, g, or t
ttttttcagatatcagccttaggatcagctttattatgtattttaccttcaccagggagaagaaggcaaggaagctggagaacagaccagcctgcatcacacagacacaaatcacatctctaaagagtgtacatggtgagaactaagggcccacattagaccagctatgaagcacagagattgacaagggcaccaaacatccatcttatctttcccttctggttgtttggattcaatcgtttacatactttcggttcattttaaaaaagcacaaccaacatttcaaagttcaataatttgctgttctttttagtgtacagagacaaaatcaccaaatttttgatttttgaaacaccgcaagccgctttgtctcaacacctgtggngg

SEQ ID NO: 303 - DNA, 820 bp, Homo sapiens
  modified_base (3)..(3): a, c, g, or t
  modified_base (21)..(21): a, c, g, or t
  modified_base (28)..(28): a, c, g, or t
  modified_base (30)..(30): a, c, g, or t
  modified_base (36)..(36): a, c, g, or t
  modified_base (38)..(38): a, c, g, or t
  modified_base (45)..(45): a, c, g, or t
  modified_base (48)..(48): a, c, g, or t
  modified_base (86)..(86): a, c, g, or t
  modified_base (141)..(141): a, c, g, or t
  modified_base (148)..(150): a, c, g, or t
  modified_base (152)..(152): a, c, g, or t
  modified_base (154)..(155): a, c, g, or t
  modified_base (161)..(161): a, c, g, or t
  modified_base (166)..(168): a, c, g, or t
  modified_base (170)..(170): a, c, g, or t
  modified_base (305)..(318): a, c, g, or t
  modified_base (320)..(322): a, c, g, or t
  modified_base (324)..(328): a, c, g, or t
  modified_base (330)..(331): a, c, g, or t
  modified_base (625)..(626): a, c, g, or t
  modified_base (629)..(629): a, c, g, or t
  modified_base (641)..(641): a, c, g, or t
  modified_base (647)..(647): a, c, g, or t
  modified_base (697)..(697): a, c, g, or t
  modified_base (713)..(713): a, c, g, or t
aantctttactcagtagaagncagctancnggtgcnanaataaanaanagatacctaacccaataaaggcaaaatcttagttatantaaccagcaaggtacatattacattattattactagaccatgcctccaagtgtgncaaattnnnananngtgttnagcannnanaaaatatacattaaagatttctctcatcataggcacaatctaatacaaaaatatatttgacatttataagttagaagatccattgagagcctccaaaataggacaggggaaggaatgagtgatgacaacataaannnnnnnnnnnnnntnnntnnnnntnnttccacttatatgattattttcttcatcagcaaagggttaagagcagtttacaccaaaccaagttaccaagcagatcacaatcagttcacaggttggataagtcacggcacgcaggccagaaaatgtactcagacttcagtcaacctaatgggacagtgtactcacactgtggttttgttgttttggagtctagaagctccatctacccattctccatggtctaccaccatgttaacacagatttaccacaggcgccatctgtaccaagcctaggatagactctttaaaaaaannaangacctggccggncacagnggttcatgcctgtaagcattttgagaggacaaggtgggtggatcatgagntcaggagttcaagacnagcctggccaaggtggtggaaccctgcctctactaaaactgcagaaagtagccaggcacgtcggtaggaacttgtaatcccagctactggcgaggtcgaccgcccgc

SEQ ID NO: 304 - DNA, 562 bp, Homo sapiens
  modified_base (15)..(15): a, c, g, or t
  modified_base (285)..(285): a, c, g, or t
ttttatctttaaccnatctcgtttattttttgtatatacatctacatacattttatacattatattcatatatacatatatacaaatgtatatatgtttaaagccacgctataagaggaagtaaatgagaaacagacaaatgaagtggtagctggaggacgtgggaatcagtacaggttttcacgcctgtttcagaaatgggagattctacagcacgctcgacactaacacatcacatccataacatatcacatccaatagacaggacagccaaaaacacaaaanaaaaaaagaatcaaatacccacacccagacacaatactcaacaacacaaatacccgaccaaagtctttaagaaagcaaaagaggctgggcacagtggctcacacctgtaatcccagcactctaggaggccaaggtgggtggaccacttgaggtcaggagttcgagaccagcctggccacatggcaaacctcgtctctactgaaaatataaaaattagccaggcatggtggcacacgcctgtaatcccagcagtttgggaggctgaggcaggaggctc

SEQ ID NO: 305 - DNA, 428 bp, Homo sapiens
  modified_base (157)..(157): a, c, g, or t
  modified_base (191)..(191): a, c, g, or t
  modified_base (237)..(237): a, c, g, or t
  modified_base (249)..(249): a, c, g, or t
  modified_base (258)..(258): a, c, g, or t
  modified_base (262)..(262): a, c, g, or t
  modified_base (271)..(271): a, c, g, or t
  modified_base (276)..(276): a, c, g, or t
  modified_base (288)..(288): a, c, g, or t
  modified_base (302)..(302): a, c, g, or t
  modified_base (304)..(304): a, c, g, or t
  modified_base (381)..(381): a, c, g, or t
  modified_base (386)..(386): a, c, g, or t
  modified_base (395)..(395): a, c, g, or t
ttttggaaaagaaatattcctaataattcatttaatcatctggagagtgggttgaagttttgtaaaatttaatttcttcattatagactgtattattttaataaaagcttttctttggtgtcacccattgtgtgcagcactgagctggggccctggnagctctcactattgtccatctggccgcaccactntcagcactgctttcaatgaactgtaacagaatactgatgactcagncatttctgctgnctgacaggnaagntccttgagncgagntctctttgtagnttcctccaagaaangnatgctcaggcactccttgggtgaacagctgcaggccatggagaggacaaccgggttgcaagtagtaagtttgcactngggcnatcccagangctagaacaaggggaacaggtcagcccctagag

SEQ ID NO: 306 - DNA, 418 bp, Homo sapiens
  modified_base (108)..(108): a, c, g, or t
  modified_base (245)..(245): a, c, g, or t
tttcttttcttttttttttttttttttgttttttgccagaagtatgatccagttgtcagtaataagatatacagggagacaggctaggcatcctctaggaatactttngctttctagataaacaacaataggaacacaacagtatcttttcttcttcctgactcaaatgcaatggacacaatgacttcaagccttgacagccattcagtaaccgtgagaaccacttgctgcttagaatggcagancagaaacacacagagcctggcccttgctggaaccactgtgcaaacgaaccatgtcgtgcaaggaaaaacaaaccccaatctgtttaaggccttgttggtcaagttttctatttacttgcaggtgaaaatgttcctatcagaaaaaggaattattatggataggatgaccaagt

SEQ ID NO: 307 - DNA, 637 bp, Homo sapiens
  modified_base (9)..(9): a, c, g, or t
  modified_base (11)..(11): a, c, g, or t
  modified_base (13)..(13): a, c, g, or t
  modified_base (68)..(69): a, c, g, or t
  modified_base (77)..(77): a, c, g, or t
  modified_base (155)..(155): a, c, g, or t
ttttgtttntnanaaatttttatttatttaaagaaataacattggttattgattagatatatatcatnntggtttanggtatgagatatagtgtccaatgtggtattattagtttaatatatatctacttgtggcaatagtgaacagtttcaagngatgaatacataatttaaagggggagaacgacataactgcacgttcatttcaatgtctgagtttgataaccaaaagtactttcattttttagataaaaattttctatttcccaaatctcaagacctggatacaaaatgtagagctgcagatttaaggcctgaatggctggagtagcaggtgttacctgaacatttgtgaacattttaccaagagaaaaaaggggaaagtggagattctcatgtctacatgtgtactcaatgaacacatgttactctgattaggtttgtgggccccatggtctccgaatcagtttcaggtctgaagataacaagagtcattgagggaaataaaacgattgattgttgcccagtgaagttggtagaaattaggatgaactatgtatgacatggtgctgtaaattcttctacttgtggactaattttggtgaccatctgtctaatcatcttaaatccttgagttt

SEQ ID NO: 308 - DNA, 534 bp, Homo sapiens
tttttttttttttttttttttttaggaatgaaaggtcataagccattagaaatagtggcattattatgcaataacaacaccctagctaacctgcttttgtcatctgtagcacttacaataaagaatgatgaccttccaaccctggacactacctcgataaagcaaaccagagatcctctctacactttctatggaagccataaaagttgccatcaatatatccactttcatagttctatacttttatactttctagacttttttatagactttatgatcagatctttttgtctcagaggataggttttgcaagattcaaaggaaaatcaaactccttggttgttccagctttgaagcttttgcttcagtaaatttgtttaaagaaccagatcacataccatttatcaaattctttacttaagtcagaatactttgcagacatacatatttggaaaacaaactgtttcttgttcactagatagaatctgtattgtagtaagaaactacttacaaggtggctttctttctgctttg

SEQ ID NO: 309 - DNA, 499 bp, Homo sapiens
  modified_base (89)..(90): a, c, g, or t
  modified_base (358)..(397): a, c, g, or t
aaaccccttctccggtgtgtgcaatgggttgaagcttgtttcctggagccagaagaggggttttcttcttttctttcctttcttttttnntttttttttttttttttaaatttttggtcgtgcacctggcttgtccccgagcgtaatattcttcaatggaaacggatctaataggtgtgagtgtgtgtgtgtcctatgctcgcgtgtgtgatgggaggtataaataaatgagtgccggtgcggcggtgtctatggccgcgctctgtgtctccgagcccctaacactaatgtcgggatcaaagggcagcggcggcggcagcacagctcacagctcgctctcttgctctctctctctctnnnnnnnnnnnnnnnnnnnnnnnnnnnnnnnnnnnnnnnnctctctctgtcacacacacacacacacaagaggcacagactgagggaaagagcgagagctacacacacacacacgcacgcacacacacacacagagcaaaga

SEQ ID NO: 310 - DNA, 645 bp, Homo sapiens
  modified_base (4)..(4): a, c, g, or t
  modified_base (234)..(234): a, c, g, or t
  modified_base (249)..(249): a, c, g, or t
  modified_base (315)..(315): a, c, g, or t
tttntttttattgtcactggatgtttattaagtattttagtttcataacttattttcataaaccttttgttcactatttgtttgggtaaatctcatcaaatttaaacacccgagactcttaaatgttctggagttttgtgggaaagtaaacacctatttgtaagtattgatatgtaaaaagttcaaattttagtatatgaccaactacaatttgcatttctctaccaagtaacnctctataatggaatntcactgtaaaacagacacttatgtccagcacaaataaagttcacaataattgtttatcacaagtanacaatcagcaaacttaatgttttacttataataaatacatgccatatacttagattctagaaagtcatcactcactacttctttgtggtaggtagcttcacagagactgtgaaacagatcatggaaagaaactgattttaccatgtgcgaagttaaagtgaaccacgtatcactcagcgcacggtggctcacgcctgtaaacactgctttagctgcatcttgtaagttttggtttgttgtgtcttcattatcacttcatctcaaggggtttgtaatttcccttaagaattttttctttgacacattttttttttttggtgttaatgacag

SEQ ID NO: 311 - DNA, 507 bp, Homo sapiens
  modified_base (13)..(13): a, c, g, or t
  modified_base (421)..(421): a, c, g, or t
  modified_base (423)..(428): a, c, g, or t
  modified_base (430)..(431): a, c, g, or t
  modified_base (449)..(449): a, c, g, or t
  modified_base (451)..(461): a, c, g, or t
  modified_base (464)..(465): a, c, g, or t
  modified_base (468)..(468): a, c, g, or t
  modified_base (491)..(491): a, c, g, or t
ttttttttttttngaggttttaggcacatatttattttattttttttaatataaaagtaaaagagtacattgttgagtagaggattaaaggagtgacgaccctttctaaagtggggtctcccatcccggatccctaagactgtaacatctgctacatacattaaaaacaaaacaaaacaaaagcaaacatgaaacttatgacctgacttcactccacccttcatgcctgcattatgacagaaacacgtcccactgctcctacttatgtatgtacatccagagctccaaacctaagctgtggccccctcctcccagccctacccacatccaccctacttcccaaaagcctgtagaagcccccacttagaaaaaaaggcagacatacacatacacagaaacacatatctatctgcagctcctncnnnnnnannccctgaaacatacacacncnnnnnnnnnnntcnnctncttatggcacagatgggacaggntggcctttcccctgtt

SEQ ID NO: 312 - DNA, 4259 bp, Homo sapiens
  modified_base (104)..(120): a, c, g, or t
  modified_base (326)..(357): a, c, g, or t
  modified_base (956)..(958): a, c, g, or t
  modified_base (967)..(967): a, c, g, or t
  modified_base (998)..(998): a, c, g, or t
  modified_base (1036)..(1036): a, c, g, or t
  modified_base (1110)..(1110): a, c, g, or t
  modified_base (1114)..(1114): a, c, g, or t
  modified_base (1116)..(1116): a, c, g, or t
  modified_base (1149)..(1149): a, c, g, or t
  modified_base (1167)..(1167): a, c, g, or t
  modified_base (1296)..(1296): a, c, g, or t
  modified_base (1368)..(1427): a, c, g, or t
  modified_base (1430)..(1431): a, c, g, or t
  modified_base (1433)..(1433): a, c, g, or t
  modified_base (1435)..(1437): a, c, g, or t
  modified_base (1579)..(1579): a, c, g, or t
  modified_base (1606)..(1628): a, c, g, or t
  modified_base (1860)..(1907): a, c, g, or t
  modified_base (1965)..(1965): a, c, g, or t
  modified_base (2007)..(2007): a, c, g, or t
  modified_base (2189)..(2189): a, c, g, or t
  modified_base (2228)..(2228): a, c, g, or t
  modified_base (2351)..(2353): a, c, g, or t
  modified_base (2355)..(2356): a, c, g, or t
  modified_base (2398)..(2399): a, c, g, or t
  modified_base (2401)..(2401): a, c, g, or t
  modified_base (2486)..(2486): a, c, g, or t
  modified_base (2516)..(2516): a, c, g, or t
  modified_base (2566)..(2566): a, c, g, or t
  modified_base (2616)..(2616): a, c, g, or t
  modified_base (2651)..(2673): a, c, g, or t
  modified_base (2677)..(2677): a, c, g, or t
  modified_base (2683)..(2683): a, c, g, or t
  modified_base (2749)..(2749): a, c, g, or t
  modified_base (2752)..(2752): a, c, g, or t
  modified_base (2756)..(2771): a, c, g, or t
  modified_base (2931)..(2932): a, c, g, or t
  modified_base (2956)..(2957): a, c, g, or t
  modified_base (2963)..(2963): a, c, g, or t
  modified_base (2974)..(2974): a, c, g, or t
  modified_base (3062)..(3063): a, c, g, or t
  modified_base (3122)..(3122): a, c, g, or t
  modified_base (3328)..(3328): a, c, g, or t
  modified_base (3476)..(3476): a, c, g, or t
  modified_base (3481)..(3481): a, c, g, or t
  modified_base (3483)..(3506): a, c, g, or t
  modified_base (3691)..(3691): a, c, g, or t
  modified_base (3696)..(3696): a, c, g, or t
  modified_base (3730)..(3730): a, c, g, or t
  modified_base (3946)..(3946): a, c, g, or t
  modified_base (3968)..(3971): a, c, g, or t
  modified_base (3973)..(3973): a, c, g, or t
  modified_base (3975)..(3975): a, c, g, or t
  modified_base (3977)..(3977): a, c, g, or t
  modified_base (3979)..(3980): a, c, g, or t
  modified_base (3982)..(3984): a, c, g, or t
  modified_base (3986)..(3992): a, c, g, or t
  modified_base (4016)..(4016): a, c, g, or t
  modified_base (4024)..(4024): a, c, g, or t
  modified_base (4043)..(4043): a, c, g, or t
  modified_base (4066)..(4066): a, c, g, or t
  modified_base (4081)..(4081): a, c, g, or t
  modified_base (4102)..(4102): a, c, g, or t
  modified_base (4122)..(4122): a, c, g, or t
  modified_base (4127)..(4128): a, c, g, or t
  modified_base (4131)..(4131): a, c, g, or t
  modified_base (4144)..(4144): a, c, g, or t
  modified_base (4161)..(4161): a, c, g, or t
  modified_base (4170)..(4170): a, c, g, or t
  modified_base (4185)..(4185): a, c, g, or t
  modified_base (4187)..(4187): a, c, g, or t
  modified_base (4189)..(4189): a, c, g, or t
  modified_base (4209)..(4209): a, c, g, or t
  modified_base (4213)..(4213): a, c, g, or t
  modified_base (4218)..(4218): a, c, g, or t
  modified_base (4224)..(4224): a, c, g, or t
  modified_base (4227)..(4227): a, c, g, or t
  modified_base (4231)..(4231): a, c, g, or t
  modified_base (4233)..(4233): a, c, g, or t
  modified_base (4246)..(4246): a, c, g, or t
gtcagtatggaggaggcggaccttgagggagagtaggaattggattgcaagaggaaggagagccttctggccagcagcagccagcagcagtgggggaggctggnnnnnnnnnnnnnnnnngggggctggggcataaggaggggcctgcctgtgaagatcatatgggccaggctgtggagggccaggcatgcccgccgggagtgcagctggtccacgggaagcatctggagtggctgggaatgggcgcaggagcagcgccgtgggagcacaggtctctttcccggggcggctcacctggtgtcttggttcctgcaagccttgaaaannnnnnnnnnnnnnnnnnnnnnnnnnnnnnnnaactccaccccaccccggagggtccagactcccctactccgagccactgtggccagctccacccagaaattccaggacctgggcgtgaagaactcagaaccctcggcccgccatgtggactccctaagccaacgctcccccaaggcgtccctgcggagggtggagctctcgggccccaaggcggccgagccggtgtcccggcgcactgagctgtccattgacatctcgtccaagcaggtggagaacgccggggccatcggcccgtcccggttcgggctcaagagggccgaggtgttgggccacaagacgccagaaccggcccctcggaggacggagatcaccatcgtcaaaccccaggagtcagcccaccggaggatggagccccctgcctccaaggtccccgaggtgcccactgcccctgccaccgacgcagcccccaagagggtggagatccagatgcccaagcctgctgaggcgcccaccgcccccagcccagcccagaccttggagaattcagagcctgcccctgtgtctcagctgcagagcaggctggagcccaagccccagccccctgtggctgaggctacaccccggagccnnnaggccactnaggcggctcccagctgcgttggcgacatggncgacacccccagagatgccgggctcaagcaggcgcctncatcacggaacgagaaggccccggtggacttcggctacgtggggattgactccatcctggagcagatgcgccgnaagncnatgaagcagggcttcgagttcaacatcatggtngtcgggcagagcggcttnggtaaatccaccttaatcaacaccctcttcaaatccaaaatcagccggaagtcggtgcagcccacctcagaggagcgcatccccaagaccatcgagatcaagtccatcacgcacgatattgaggagaanggcgtccggatgaagctgacagtgattgacacaccagggttcggggaccacatcaacaacgagaactgctgnnnnnnnnnnnnnnnnnnnnnnnnnnnnnnnnnnnnnnnnnnnnnnnnnnnnnnnnnnnncannancnnnaagaagcgcatcccggacacccgcgtccactgctgcctctacttcatccccgccaccggccactccctcaggcccctggacatcgagtttatgaaacgcctgagcaaggtggtcaacatcgtccctgtcatcgccaaggcgnacacactcaccctggaggagagggtcnnnnnnnnnnnnnnnnnnnnnnnagacctgctgtccaacggcatcgacgtgtacccccagaaggaatttgatgaggactcggaggaccggctggtgaacgagaagttccgggagatgatcccatttgctgtggtgggcagtgaccacgagtaccaggtcaacggcaagaggatccttgggaggaagaccaagtggggtaccatcgaagttgaaaacaccacacactgtgagtttgcctacctgcgggaccttctnnnnnnnnnnnnnnnnnnnnnnnnnnnnnnnnnnnnnnnnnnnnnnnncttcgaggcgtaccgtgtgaagcgcctcaacgagggcagcagcgccatggccaacggngtggaggagaaggagccagaagccccggagatgtagacgccnccctgcccacccccgggatcctgcccccaagtcatttccgtcccccccccaggccctcccaccaccccattttattttatatgattttctccatttgtcatcgttccccaccccttcgacatgctgccaggaaacaagggaaggggcctccctccgagtgagtcagtgatgaggccgcggcntccccgaggttgtggggaggctgcactggagccacaggnaggggtgagagcacccactgaattgacatgaccctctgtccccaggcctggctccccgagggctcagaagagcagcttcggtgtgcagatcatccgtccgtgtggggttctcagtgccggagnnntnngggtgggggccaggcctcgcacttgcagaggagcccagtggnntncacgctcccctccatccccatcggccctgtcccctggagtgtgtcagagcccaggggagaatgcagcccaccaggagcacctggnaccccctgcccgccacatggtgtggccatncactcagcccctacccctgccctgctcctaagggtagaaaactccagggntcccctgccaccgactgcccagccactccaagccccctggcagctgcccntcctggagcagaaagtgcctttatctcagccatcnnnnnnnnnnnnnnnnnnnnnnngggnacaggntggaatgagggaggcgtcttcatctccctgccatccccctctcacgccacccccgcccccaccggnctngcannnnnnnnnnnnnnnntgggatctgattgaggataaaaaggaaggagagatgacccctaccccctcatcccccagttttgaaaaggtctaagcaagtgagtctggtggaggagctgagggagggagccatggaaggtgccagaaggaaggttggcgggggcacgtgtgggccgtgnnttgggctggtcagagtggcgtganntgcccnggcgcctgccntgcccaagtgaccagggaagtgtgtgtgtgtccatgtgtatgcgtgtccgtctgtctgtctagtgtctgggtttggcccaagactggnntgtagttacattaatgcccagccagccacccctgccactcacccctcctggcccaggcnttgctgactctctgagctggggaggtgggaggccaggcgagcctgactctgttgatctacccgtgcctgggcccctcccctcagagcccatggtaacgaacccctagaaaggagagaacgggcgtcaggggtgcacagtccacagctgaagagcaaggtttcgtggcagcacggcccggcccctcaccctctgtccccacgagggnacccatgggggctgtctttgcagggcacagatgaccaaagtcccttcctgcttcctgttacctgtcttgctcctggggagaaagaggggcctgatgagactccactcaggtgcacacatcaccaggtgcatctgcaggcaccgggctnggctncnnnnnnnnnnnnnnnnnnnnnnnngaaggagtgtatgagtgtgagtgtgtgtgcatggaagttggggcactgggcgtctgactccctccccacccaagagaggaaggacccctcaccacccccactggcgagacagtttactttgccgacttgccatgtttttgccaaaaccaagattttgaaggaaatgagtggccagcgccagggcnccagnccatgtggcctgcccagcctcaatgtcacttggnggcggggtggggtgggggtgggcagcagcatcccagccttgagatgcttcactttccttctctgtaaccagactttgaaaaattgttcgtttcatcaggctctgttcctcaatggccttttgctacgtgcctcccgagaaatttgtctttttgtataaatgacaaagtgttgaaaatgtatttcctgaaataaatgtttcaaatgcagaaacccanaaaaaaaaaaaaaaaaaaaaannnnanananannannnannnnnnntgtacaaaaggggtcctgctgtgnttgttaantcagtttcccctcttggtnaccctagctggaagagggggggncccggtacccaattngcctataggtgagccgatttnaatttaatggccgtggtttnaacgnngtncttggaaaccctngggttcccacttattgntttagaaanccctttgcacttggnantnaagggccgccgttgcttcanagtnccgtnatgggntgnattnangtaatttttaaanggaattttaaaac

SEQ ID NO: 313 - DNA, 3835 bp, Homo sapiens
gcataagtttttttttcttaaaaaaacggcatctgcttaaagggatttatgactaaaattgcttatttttctacagagttgtctgctggttctcagcttgaagaagattctgaagtccttattgatcctttttcttggcgttaccattttttgaagcaaagttaacctagctttctagtttgagctttctttttggccgtctttaaaaaaaattttttttttaatctataaaatagacaagagctagttctacaatgtccaagtcattccagcagtcatctctcagtagggactcacagggtcatgggcgtgacctgtctgcggcaggaataggccttcttgctgctgctacccagtctttaagtatgccagcatctcttggaaggatgaaccagggtactgcacgccttgctagtttaatgaatcttggaatgagttcttcattgaatcaacaaggagctcatagtgcactgtcttctgctagtacttcttcccataatttgcagtctatatttaacattggaagtagaggtccactccctttatcttctcaacaccgtggagatgcagaccaggccagtaacattttggccagctttggtctgtctgctagagacttagatgaactgagtcgttatccagaggacaagattactcctgagaatttgccccaaatccttctacagcttaaaaggaggagaactgaagaaggccctaccttgagttatggtagagatggcagatctgctacacgggagccaccatacagagtacctagggatgattgggaagaaaaaaggcactttagaagagatagttttgatgatcgtggtcctagtctcaacccagtgcttgattatgaccatggaagtcgttctcaagaatctggttattatgacagaatggattatgaagatgacagattaagagatggagaaaggtgtagggatgattctttttttggtgagacctcgcataactatcataaatttgacagtgagtatgagagaatgggacgtggttctggccccttacaagagagatctctctttgagaaaaagagaggcgctccttcaagtagcaatattgtagacgttcattggactcttaccgaaagggttatccccatctgtgctctatatgtgattggccaggtcattctaataaggagtggagtcaacatatcaatggagcaagtcacagtcgtcgatgccagcttcttcttgaaatctacccagaatggaatcctgacaatgatacaggacacacaatgggtgatccattcatgttgcagcagtctacaaatccagcaccaggaattctgggacctccacctccctcatttcatcttgggggaccagcagttggaccagaggaatctgggtgctggaaatggaacctgcaaggacctagacacatgcagaaaggcagagtggaaacttagcagagttgttcacatcatgggtttttcaacggaggaaaaaactttgagataccagctattacagctggtagaaccatttggagtcatttcaaatcatctgattctaaataaaattaatgaggcatttattgaaatggcaaccacagaggatgctcaggccgcagtggattattacacaaccacaccagcgttagtatttggcaagccagtgagagttcatttatcccagaagtataaaagaataaagaaacctgaaggaaagccagatcagaagtttgatcaaaagcaagagcttggacgtgtgatacatctcagcaatttgccgcattctggctattctgatagtgctgttctcaagcttgctgagccttatgggaaaataaagaattacatattgatgaggatgaaaagtcaggcttttattgagatggagacaagagaagatgcaatggcaatggttgaccattgtttgaaaaaagccctttggtttcaggggagatgtgtgaaggttgacctgtctgagaaatgtaaaaaactggttctgaggattccaaacagaggcattgatttactgaaaaaagataaatcccgaaaaagatcttactctccagatggcaaagaatctccaagtgataagaaatccaaaactgatggttcccagaagactgagagttcaaccgaaggtaaagaacaagaagagaagtccggtgaagatggtgagaaagacacaaaggatgaccagacagagcaggaacctaatatgcttcttgaatctgaagatgagctacttgtagatgaagaagaagcagcagcactgctagaaagtggcagttcagtgggagacgagaccgatcttgctaatttaggtgatgtggcttctgatgggaaaaaggaaccatcagataaagctgtgaaaaaagatggaagtgcttcagcagcagcaaagaaaaagcttaaaaaggtggacaagatcgaggaacttgatcaagaaaacgaagcagcgttggaaaatggaattaaaaatgaggaaaacacagaaccaggtgctgaatcttctgagaacgctgatgatcccaacaaagatacaagtgaaaacgcagatggtcaaagtgatgagaacaaggacgactatacaatcccagatgagtatagaattggaccatatcagcccaatgttcctgttggtatagactatgtgatacctaaaacagggttttactgtaagctgtgttcactcttttatacaaatgaagaagttgcaaagaatactcattgcagcagccttcctcattatcagaaattaaagaaatttctgaataaattggcagaagaacgcagacagaagaaggaaacttaagatgtgcaaggagatttaatgatttcaaagaaaataatggttctttgtttttaatgttaaccttttttaaatacaatactgatagttagaagaaaactattgtactcttttgttttagtggagaaataatagatgtctgttcatgtgttaagtgttatagcaaaaaaaatacacatatggttaagttaatgaatagtttttgttttatcagaatggcaacagacagaagtactttgtagagattgacttcctaagctacttaagacaacttgcaccactaagaaaaaaatgtagaaccatttggaaaaatgaaatttagtagttccaagtttcaaagaaatgtcaacattttattccattcaataaagaacaaaaccaatagtgtttttattactttcatctgaaacattccatgttttaatctgagccttgcagactttcatttggagtttgaacccgttttggttgcatttcatttttggagaacttaattaacgtgagattggcaattgaaatgcaggtgcagttttctgttaatgtcatgctgttgtttaggtaataagaaatattaagtaattggctttagattttgtaatttttttccctgagttcctgctagatttcgtattctagtagtcaatgtattttcagtgaaatgcaaaaatattcccattatctttgaccagtattaatttttgagatcttactgcttgtcacttgaatcccgtgattgtcatacatctctggtataagcaacatttgatttttgaagtgtgtagaccatctcttcatattttcaagatgtaattttacatttctgcatttttaaaacagtttggccataatcctagatgcacgcttctaattcatgtacctgcacatgtgacctttgtgaacagaaatttgcatgtataatttgtgtttacttgtaactttctggttatatactgcttatatctgtggattcaagttactgaagtgaataccaataaaaagaaaaccctaggccatgttaaaaaaaaaaaaaaaaaaaa

SEQ ID NO: 314 - DNA, 2056 bp, Homo sapiens
ggaaccgcggctgctggacaagaggggtgcggtggatactgacctttgctccggcctcgtcgtgaagacacagcgcatctccccgctgtaggcttctcccacagaacccgtttcgggcctcagagcgtctggtgagatgctgttgccgctgctgctgctgctacccatgtgctgggccgtggaggtcaagaggccccggggcgtctccctcaccaatcatcacttctacgatgagtccaagcctttcacctgcctggacggttcggccaccatcccatttgatcaggtcaacgatgactattgcgactgcaaagatggctctgacgagccaggcacggctgcctgtcctaatggcagcttccactgcaccaacactggctataagcccctgtatatcccctccaaccgggtcaacgatggtgtttgtgactgctgcgatggaacagacgagtacaacagcggcgtcatctgtgagaacacctgcaaagagaagggccgtaaggagagagagtccctgcagcagatggccgaggtcacccgcgaagggttccgtctgaagaagatccttattgaggactggaagaaggcacgggaggagaagcagaaaaagctcattgagctacaggctgggaagaagtctctggaagaccaggtggagatgctgcggacagtgaaggaggaagctgagaagccagagagagaggccaaagagcagcaccagaagctgtgggaagagcagctggctgctgccaaggcccaacaggagcaggagctggcggctgatgccttcaaggagctggatgatgacatggacgggacggtctcggtgactgagctgcagactcacccggagctggacacagatggggatggggcgttgtcagaagcggaagctcaggccctcctcagtggggacacacagacagacgccacctctttctacgaccgcgtctgggccgccatcagggacaagtaccggtccgaggcactgcccaccgaccttccagcaccttctgcccctgacttgacggagcccaaggaggagcagccgccagtgccctcgtcgcccacagaggaggaggaggaggaggaggaggaggaagaagaggctgaagaagaggaggaggaggaggattccgaggaggccccaccgccactgtcacccccgcagccggccagccctgctgaggaagacaaaatgccgccctacgacgagcagacgcaggccttcatcgatgctgcccaggaggcccgcaacaagttcgaggaggccgagcggtcgctgaaggacatggaggagtccatcaggaacctggagcaagagatttcttttgactttggccccaacggggagtttgcttacctgtacagccagtgctacgagctcaccaccaacgaatacgtctaccgcctctgccccttcaagcttgtctcgcagaaacccaaactcgggggctctcccaccagccttggcacctggggctcatggattggccccgaccacgacaagttcagtgccatgaagtatgagcaaggcacgggctgctggcagggccccaaccgctccaccaccgtgcgcctcctgtgcgggaaagagaccatggtgaccagcaccacagagcccagtcgctgcgagtacctcatggagctgatgacgccagccgcctgcccggagccaccgcctgaagcacccaccgaagacgaccatgacgagctctagctggatgggcgcagagaacctcaagaaggcatgaagccagcccctgcagtgccgtccacccgcccctctgggcctgcctgtggctctgttgccctcctctgtggcggcaggacctttgtggggcttcgtgccctgctctggggcccaggcggggctggtccacattcccaggccccaacagcctccaaagatgggtaaaggagcttgccctccctgggccccccaccttggtgactcgccccaccacccccagccctgtccctgccacccctcctagtggggactagtgaatgacttgacctgtgacctcaatacaataaatgtgatcccccaccc

SEQ ID NO: 315 - DNA, 2262 bp, Homo sapiens
gctgcgccgccattaagagctagccctcagaactatcctctctaaggtttcacagtcctgcccaagatggccgtctcggctctggcaccgcccccactcctgcctctcccaacatggcgaccctgagtctccgttcccggtgcggaacgtacgaccggaagtgacggggtccagaaatttccgctttctttctgcagcaggaaccgcggctgctggacaagaggggtgcggtggatactgacctttgctccggcctcgtcgtgaagacacagcgcatctccccgctgtaggcttcctcccacagaacccgtttcgggcctcagagcgtctggtgagatgctgttgccgctgctgctgctgctacccatgtgctgggccgtggaggtcaagaggccccggggcgtctccctcaccaatcatcacttctacgatgagtccaagcctttcacctgcctggacggttcggccaccatcccatttgatcaggtcaacgatgactattgcgactgcaaagatggctctgacgagccaggcacggctgcctgtcctaatggcagcttccactgcaccaacactggctataagcccctgtatatcccctccaaccgggtcaacgatggtgtttgtgactgctgcgatggaacagacgagtacaacagcggcgtcatctgtgagaacacctgcaaagagaagggccgtaaggagagagagtccctgcagcagatggccgaggtcacccgcgaagggttccgtctgaagaagatccttattgaggactggaagaaggcacgggaggagaagcagaaaaagctcattgagctacaggctgggaagaagtctctggaagaccaggtggagatgctgcggacagtgaaggaggaagctgagaagccagagagagaggccaaagagcagcaccagaagctgtgggaagagcagctggctgctgccaaggcccaacaggagcaggagctggcggctgatgccttcaaggagctggatgatgacatggacgggacggtctcggtgactgagctgcagactcacccggagctggacacagatggggatggggcgttgtcagaagcggaagctcaggccctcctcagtggggacacacagacagacgccacctctttctacgaccgcgtctgggccgccatcagggacaagtaccggtccgaggcactgcccaccgaccttccagcaccttctgcccctgacttgacggagcccaaggaggagcagccgccagtgccctcgtcgcccacagaggaggaggaggaggaggaggaggaggaggaagaagaggctgaagaagaggaggaggaggaggattccgaggaggccccaccgccactgtcacccccgcagccggccagccctgctgaggaagacaaaatgccgccctacgacgagcagacgcaggccttcatcgatgctgcccaggaggcccgcaacaagttcgaggaggccgagcggtcgctgaaggacatggaggagtccatcaggaacctggagcaagagatttcttttgactttggccccaacggggagtttgcttacctgtacagccagtgctacgagctcaccaccaacgaatacgtctaccgcctctgccccttcaagcttgtctcgcagaaacccaaactcgggggctctcccaccagccttggcacctggggctcatggattggccccgaccacgacaagttcagtgccatgaagtatgagcaaggcacgggctgctggcagggccccaaccgctccaccaccgtgcgcctcctgtgcgggaaagagaccatggtgaccagcaccacagagcccagtcgctgcgagtacctcatggagctgatgacgccagccgcctgcccggagccaccgcctgaagcacccaccgaagacgaccatgacgagctctagctggatgggcgcagagaacctcaagaaggcatgaagccagcccctgcagtgccgtccacccgcccctctgggcctgcctgtggctctgttgccctcctctgtggcggcaggacctttgtggggcttcgtgccctgctctggggcccaggcggggctggtccacattcccaggccccaacagccttcaaagatgggtaaaggagcttgccctccctgggccccccaccttggtgactcgccccaccacccccagccctgtccctgccacccctcctagtggggactagtgaatgacttgacctgtgacctcaatacaataaatgtgatcccccacccaaa

SEQ ID NO: 316 - DNA, 3667 bp, Homo sapiens
  modified_base (3)..(8): a, c, g, or t
  modified_base (14)..(23): a, c, g, or t
  modified_base (64)..(68): a, c, g, or t
  modified_base (399)..(399): a, c, g, or t
  modified_base (2090)..(2090): a, c, g, or t
  modified_base (2170)..(2170): a, c, g, or t
  modified_base (2257)..(2257): a, c, g, or t
  modified_base (2445)..(2445): a, c, g, or t
  modified_base (2529)..(2529): a, c, g, or t
  modified_base (2550)..(2554): a, c, g, or t
  modified_base (3592)..(3594): a, c, g, or t
  modified_base (3596)..(3596): a, c, g, or t
  modified_base (3598)..(3598): a, c, g, or t
  modified_base (3600)..(3600): a, c, g, or t
  modified_base (3602)..(3603): a, c, g, or t
ttnnnnnntttttnnnnnnnnnnttttttttttttttttttttttttttttttttttttttttnnnnntgcataaaacaagtttaatttccaaccagggtcacagtcatcgcgttatcccacattttgagcaaggatagagaaggtgagttattaaacatatacagtctacattccagaggaggaactgcagttaccactataacaccacagacaaactttggggtggggggagcgggagtcctcaggaagcagaaagctggaatcagggaaagcataaaattaaacctaccagagaggagaggagagggagtgggcagaaatggaatgaaacacccaatcccaaaagagctgttaagtgaatgggaatgtagaaaggaccacccctgccaagggcttnagcagccagggatactaccaagatcacttactgccccctgctggacagatctggggcagcaccaaggcaacctcctaacatttccagccccagattggtccctggagcccccaaaaaaacaaggtgaggggtgaggcctgaagtgaggaaaacctatttaggactgacatctaactagagaaagtcagggaatgaggcaggagaagaggcaaagtcctcatgaaccacaaagatagagtggaaaatcctaagtaggaaaaaatacatggaaaagggcaaatgagcaacagcagtgaatgagttgagattgaaaaggaaagagttcaaggaaggagaggcaatggggcaagacaaaataaatctgaggaaacagagcaaataaaaagtatggagggaagcatctgtggggccagggaaatgaatacatttttaaatgaaatagaacctccaacaccccccccacaaccaccacacacaaacacacccacacccatatacacacacactcacacacacacacaggcctagagagcaagatacctgcacacacctgctgcatcctgggtaacacatcactaagtaactggcactgagggagatacccctggaacctctctttcacagttcaatcttggatggggttactaatattgatccatctgctatcaacaaaagtggccaggaaacctggccccatggagtggggcttgggacagccctactgggaaggggtccctcagccatgctgtggggggccctgggccctgaccttagcaggttatgggcagctgtctcggagctcagggcgcagccagcacacacaggagcccacaggacagccacgtcttcacagaaactacagaagtcaggacccaggcgaggacctcaggaacaagtgccccctgcagacagagagacgcagtagcaacagcttctgaacaactacataataatgcggggagaatcctgaagaccactgcatcccacaagcactgacaaccacttcaggattttatttcctccactctaacccccagatccatttatgagaagtgagtgaggatggcaggggcatggagggtgaagggacagcaaggatggtctgagggcctggaaacaatagaaaatcttcgtcctttagcatatcctggactagaaaacaagagttggagaagaggggggttgatactaaggtcagctatgtcaccccacttcccagctcctcattagaatacccagtcagccctggtcaggccagtaggagtactagggtgagaaaattctgaccaaggacagatgacccatccaacccctaagatcagaagggtggtggggcactggaaggcaggaatgggattggcccatgcctcaccttctcctaataacaaaagagaatgaagatggaaaacctcaggccttcgcctcccttcccccaatgccctgggtccctaacacacaccatggacttgccatccccaccccccagtcaagctccagaggaacagatctgaagatggtggggaaggatcagttgaacactctaagctgataagagtgagtgggttcctctctccttcccaacagtaaggcagagcagagtggcatctccttgggaacagtcatctagagataaatgccatcctccagccctaagaagggtggagagaagagtacaaggaaaatggtggtgnagaatccatcatctgtcctatcatccagaaaaacctacctgcagagaggagggtaaccagtcaaagactggggcagtccngcttgactaatgccctcccaccttcttcccttaatctcaccaacacggaaggggcagatgacaggctccagtgggcagtgtcctggnctgcaagccctgagcttcactccaccccctccccgctccccccggcccccacaaatatatctctctatacatgtatatacaggcgcacacatgcacgcaaacacagagaggcccgtgcaatttccatgtaaaacagggagagggtggcaaaggaaaggcaaacagggagtagaagggcttgtgggganagggaaaggactcagatgccaagaggacagcaaccactgccaaacaaagagaataccccactcgacctcccgaaacccagaggntgagagagagagaggggccannnnntgaaaccgtaacaactttttgttttaaatccagtaaattggaatgactcatcatcaggacagcaattagggattggtcatataggtggacaggaaaaaggaggggaggcaggggaggcaaggctcttgctgggcatgtggacatgatacccagggccctggccacacttgcatggagaggaaggggtaggactggggcagggtgacagtaggtatgtcaggggtgggtggggtgctttgttagggctgtctggctttcacttcttgtttttgagctgattggccagccagtccaggccttcgtacagcccgtccccgctggtggcacaggtggcctgaatgtaccagttacggtgacgaagggaatgcaggcccagcttgtctgtgatctcagcagcgttcatagcattaggcagatcctgtttgtttgcaaagacaaggagtacagcatcccggagctcgtcctccgccagcattctcatcagctcttcccgggcctcatttactcgctcccgatcattgctgtcgaccacaaatatcaacccttgggtgttctggaagtagtgtctccagaggggtcgaatcttgtcctggccacccacatcccacactgtaaagctgatgttcttatactccactgtctccacattgaacccaatggtagggatggtggtgacgatctcccccagtttcagcttgtataggatggtggtctttcctgcggcatccaggcccaccatcaggatgcgcatctccttcttcccaatcaggctcttgagaaggtttccaaagatattgcccatgatcacagcagctgctttctggggacagtggggcccaagtaggggcagtggcagtctggttttggcctggtccctggtatggaagacttgatcctgttcctgctatcagctgcgccgctgcggccgccgcctctgccccgcaggttccgctccgctccctctggctccccaagccgacttcagcccggctgctgcctggcccactccccggctccctccttccttccctccacctnnncncngnannccgcgacggcgactggagctgtgcggcgtacccccacccccagcccgggatacttcccacctcc

SEQ ID NO: 317 - DNA, 1890 bp, Homo sapiens
gacccacgcgtccggggaggagaaagtggcgagttccggatccctgcctagcgcggcccaacctttactccagagatcatggctgccgaggatgtggtggcgactggcgccgacccaagcgatctggagagcggcgggctgctgcatgagattttcacgtcgccgctcaacctgctgctgcttggcctctgcatcttcctgctctacaagatcgtgcgcggggaccagccggcggccagcggcgacagcgacgacgacgagccgccccctctgccccgcctcaagcggcgcgacttcacccccgccgagctgcggcgcttcgacggcgtccaggacccgcgcatactcatggccatcaacggcaaggtgttcgatgtgaccaaaggccgcaaattctacgggcccgaggggccgtatggggtctttgctggaagagatgcatccaggggccttgccacattttgcctggataaggaagcactgaaggatgagtacgatgacctttctgacctcactgctgcccagcaggagactctgagtgactgggagtctcagttcactttcaagtatcatcacgtgggcaaactgctgaaggagggggaggagcccactgtgtactcagatgaggaagaaccaaaagatgagagtgcccggaaaaatgattaaagcattcagtggaagtatatctatttttgtattttgcaaaatcatttgtaacagtccactctgtctttaaaacatagtgattacaatatttagaaagttttgagcacttgctataagttttttaattaacatcactagtgacactaataaaattaacttcttagaatgcatgatgtgtttgtgtgtcacaaatccagaaagtgaactgcagtgctgtaatacacatgttaatactgtttttcttctatctgtagttagtacaggatgaatttaaatgtgtttttcctgagagacaaggaagacttgggtatttcccaaaacaggtaaaaatcttaaatgtgcaccaagagcaaaggatcaacttttagtcatgatgttctgtaaagacaacaaatccctttttttttctcaattgacttaactgcatgatttctgttttatctacctctaaagcaaatctgcagtgttccaaagactttggtatggattaagcgctgtccagtaacaaaatgaaatctcaaaacagagctcagctgcaaaaaagcatattttctgtgtttctggactgcactgttgtccttgccctcacatagacactcagacaccctcacaaacacagtagtctatagttaggattaaaataggatctgaacattcaaaagaaagctttggaaaaaaagagctggctggcctaaaaacctaaatatatgatgaagattgtaggactgtcttcccaagccccatgttcatggtggggcaatggttatttggttattttactcaattggttactctcatttgaaatgagggagggacatacagaataggaacaggtgtttgctctcctaagagccttcatgcacacccctgaaccacgaggaaacagtacagtcgctagtcaagtggtttttaaagtaaagtatattcataaggtaacagttattctgttgttataaaactatacccactgcaaaagtagtagtcaagtgtctaggtctttgatattgctcttttggttaacactaagcttaagtagactatacagttgtatgaatttgtaaaagtatatgaacacctagtgagatttcaaacttgtaattgtggttaaatagtcattgtattttcttgtgaactgtgttttatgattttacctcaaatcagaaaacaaaatgatgtgctttggtcagttaataaaaatggttttacccactaaaaaaaaaaaaa

SEQ ID NO: 318 - DNA, 2493 bp, Homo sapiens
aactgagggggtggctagcagcaaacaagtatggagctagcacaagagctaagaaataacctccatccctaccactcagcacacaacccctacggtcccagcacactgagccctggctcccaagggctgcctcctgacagctccgtcatggcactttttaacgcttcagcaacaaacaccaggcagctgttgccactggcctcctacccctactctggggcttgggggtcactccccccaggacttaccttccaaaacaaactttcttcactttgtattataggtacaagacagcgacttacgtatcttttctcctcctccctagtgttcctccccattttttcagaaaacacttctgactcctgtcccttccccttctgcttttggtcagtccctgttcttgagcctcttttctcctctccccaggatgcagaaagtggtgaacccaggaactgaggaaggaggtttccagttcatttacattaagggccctgggggagaataaagctcagagcaggagggagtaaggaaacatttcctttttgtttttatttggttggagtttctcatatttgaaaacattgcggtatccatgatttggccttgtggagggtgttcctaggtagaggtgagaatggggaggcaagatctcaggcaccaggcaggaggtgccttgtaagctaactgggcggaggtggaggtgcagtgtcaactgtggctctgtaactcttcaaaggcccagtttcccctcacgcagcctcttaggtagcgtttcccctaatcgtgggggttggaccccagagtcttccaaagaattttcactggttgcctgcatctttggctctgctgtgatctgattggaggagggacagtttctggtacccatcctctgatttatacatatgcattttttcccctctggcctttagatggcctcagccccagccaccatatacccctgcagtttgcactttaattgatggtagttcagttggggtacttgttttatggaagttttgattgatttacttgccctcccaccttctttttaattcaatgaaatctgaggttaatgcgaggttcgaggagaggttatagataaaactaccagtggcagctactcaagtcctatctccactgttagcttcctccaactctaattattaacctatattcttgccaagctaactattgactataggtttgcctttcctggagaattaattgagcaattgaggagtgtctcaggatagcacaggccaaggtaggggagtaaaaaggaggtcaggcaaaagggaggagttttctgtcctttcccaggtttcacactcaatttgatatccattaccatgtcttttctacttccttgtaaataggtatgatctttattcccactgtacagtctgttctatcctctgcctcccatcaggccctgtttctttgttcctttgttaatatcttgaatttagtccctccatccttaatccccccatccctccccatcatgcaaccagtggtttaatccatgtaccaataggggctagtaccacagaggcctcctgtggtgccctcgtatcataccacctgttcctgtggagagggaatgaccggcactgaaggtaccttacaactggctcatattatcagaggaccttggtcctttctaaatctctagtctctcttcatatccttcatcaggtgttttaagatgtctctgagaagccatcaaggcaaaagagaactttaagttccttgttccagcccggagttttgggaaagaaagaaaggaaaggtcacagtgacctaggattggaaccttcctgcccttttggcttgcagactgccttctatcccagaacagctgagaaatctatgaagctgagattctgaaggacccagcttaggttcttccacttaaggcctcaattcccttccttttccaaggggcagccttagttcccatggccctgaaacacacacatttcccccttcctttcccagaagccactggccccccatagcacccagtgcatcctttttacaagtggaagaactaggatggctttccaaagtcttctagaaatgaagttctttctctgtgcagctttcccccttggagcaggagtgaagatgtttcattatcttgggcctgggaaaccacttccccaggcttctccctccccccacccccataggaacaggatttggccttagcttcgtgggcctatcggctgccttccctctacttcctaccacctcttctgccttcctttgagctctgttgggcttggggatcttagttttcttttgtttatttcccagctcatttttttcttctggtcagtttttttaagggggggtgttgtggttttttgtttttgttttgcttctgagaaagcatttgcctttcttcctctcccaacataacaatcgtggtaacagaatgcgactgctgatttaccgatgtatttaatgtaagtaaaaaaaggaaaa

SEQ ID NO: 319 - DNA, 3500 bp, Homo sapiens
agaatttgtttgtaaggtatgggaaggtcggtggcgagtgatccctcatgatgtactaccagactggctcaaggataatgacttcctcttgcatggacaccggcctcctatgccttctttccgggcctgttttaagagcattttcagaatacacacagaaacaggcaacatttggacacatctcttaggttgtgtatccttcctgtgcctggggatcttttatatgtttcgcccaaatatctcctttgtggcccctctgcaagagaaggtggtctttggattatttttcttaggagccattctctgcctttctttttcatggctcttccacacagtctactgccactcagagggggtctctcggctcttctctaaactggattactctggtattgctcttctgattatgggaagttttgttccttggctttattattctttctactgtaatccacaaccttgcttcatctacttgattgtcatctgtgtgctgggcattgcagccattatagtctcccagtgggacatgtttgccacccctcagtatcggggagtaagagcaggagtgtttttgggcctaggcctgagtggaatcattcctaccttgcactatgtcatctcggaggggttccttaaggccgccaccatagggcagataggctggttgatgctgatggccagcctctacatcacaggagctgccctgtatgctgcccggatccccgaacgctttttccctggcaaatgtgacatctggtttcactctcatcagctgtttcatatctttgtggttgctggagcttttgttcacttccatggtgtctcaaacctccaggagtttcgtttcatgatcggcgggggctgcagtgaagaggatgcactgtgatacctaccagtctccagggactatgaccctaaaccagggcctgcggcacttgcgggcctccctgctggctactgatgccagtaccagaggagccccaaaactttgacagcctcgtgggctttgtgacggcccaggggctctgcgtggtacatgactgagaagagaaaaacaaaaataaatcatacctcaaaggatggagtgcatcaattgggagaaaaggagacatagcccaaaccctggcttattcttgggatctactgattgcgggctctgcaagacccttggcaaactggcttctgatccatatcatatttatttgtagaagatggcgaaacagtttagctggtggttctttcttctccctttctctctctctatgacaataatacaaaccaatttaagtgaacatttatatccgataaggggtgggagtgtgattttaaatgctcttttgggagaacaaagaaattaatgtaaataagatttctaactgtttaaataagactttatataaatgtttaaaacataggggtaagggagggagggagaatttttgtatagaatgaaacatgcaagtaccacacactgtttgaattttgcacaaaaagtgactgtaggatcaggtgatagccccggaatgtacagtgtcttggtgcaccaagatgccttctaaaggctgacataccttggaccctaatggggcagagagtatagccctagcccagtggtgacatgaccactccctttgggaggcctgaggtagaggggagtggtatgtgttttctcagtggaagcagcacatgagtgggtgacaggatgttagataaaggctctagttagggtgtcattgtcatttgagagactgacacactcctagcagctggtaaaggggtgctggaggccatggaggagctctagaaacattagcatgggctgatctgattacttcctggcatcccgctcacctttatgggaagtcttattagagggatgggacagttttccatatccttgctgtggagctctggaacactctctaaatttccctctattaaaaatcactgccctaactatacttcctccttgagggaatagaaatggacctttctctgacatagttcttggcatgggagccagccacaaatgagattctgacgtgtccaggtttctcctgagctcatctacatagattggtagacccttcctttggattaggaaagatgagttttacctctggtacactgtcttggtaagcctggatgtgacagacacctcggctctccttgaataagaaagccagcagaactcttaaagccagttgtagtacggagttgtcagcactcactgaacctcactttacagggataagagtggtgtggcattttaaatacaatggtatgttattgccagggagtgaggtacaagacgatggctcatgtcacaggcctacctgatacggtgtcagagaaagtggtggggaaaggatctggttcatggaattctgatcttggcccataggtgaaccaccaaaatagtgctcgagtcttaggttactgtcatcaaagacttgggatgactccattatatcctggggttgtgggtattagaactaaatatggaggtcctgagcatggggactggtgtcctcagtaggtgtttgggaatatgggaagggtctcctatttattcaatagagttttctcagttattttcctccctcgcccttgcaatctccagcaaaaggtgggatctaggaagaaagaatccagtgtagaagttgagaagaacttgaacgttttggttctggataaggtcactgtcctaggtgctaggtggaccgagcaaaagactcagtggatgaactggtgcagtgcctgacagaataaagaacagtattaatccctttgagaaagcatagtccagcaggacagtggccatttggacagaagcccacttagtttcttgggagcaacagcacgtatcagaagccagacttgctcttcggtcatgcactttgggatacagcgtataggtgcagccctgtcacaacaccaacagaagtagcagcctctgggtgcagtcacccacaccccaaagctggaaggatctggttcaacatagcacaaacccttaggaaaaatgaaattaacatcactgatgtgtaatccagtaaaatctccctttttcgggtgtgtatgtgggcatgtgcccatttctatgtgtgtgtctacgtgcagctcactaccaacagcctcatgtgcacttgacctgacagtgctcgctgagaactctcaccaggttggcgcctgaatgccttactctcagcagtcagaggcttgcttgctctgtgcagatttttaattttcttttttggccctaggctggttgggacctctacagcttcattctttcacattaaatagtgacctttttcagtattttccctcttcccctttataaattatgctaaagccacaaagcacatttttggggatcatagaaggttggggttccagaaaggcatctgtgtgatggttccattgatgtgggatttccctacttgctgtattctcagtttctaataaaaagaaccaaatgaaaaaaaaaaaaaaaa

SEQ ID NO: 320 - DNA, 3650 bp, Homo sapiens
  modified_base (9)..(10): a, c, g, or t
  modified_base (17)..(18): a, c, g, or t
  modified_base (536)..(549): a, c, g, or t
  modified_base (3166)..(3166): a, c, g, or t
  modified_base (3530)..(3530): a, c, g, or t
  modified_base (3532)..(3532): a, c, g, or t
  modified_base (3536)..(3536): a, c, g, or t
  modified_base (3538)..(3538): a, c, g, or t
  modified_base (3541)..(3543): a, c, g, or t
ttttttttnnttttttnntttgcatatcacaaagttttattaatgtaattttaaggccaattaaactaattttattcaaagtaagtctacattaaattacaatattaacaatctctagacacaacgaacttataagaaaaaaaaatagaaatctgtttggtctttcttagaccacatatcatggaactcataaatgaaaattttcaaagatagaaatgacaattaaagagtgaggattttaatatggaaacccacaaggtgtcatatttcaaacccgcatgtttcaaaaagagactcttaataatttagcacaaaatcaaattatataaacttggtatattccagaaaatattgctttaaacacttatgccatgatcaaaattcctttggtagcttttaatcaaaatgaaacatgctattatgtaaaatataaagtacttttaaatgttatctcaaaagtatctttgtcatagttacccttctaacatcactactgaactttcctttcactgttcaacctcatgtatatatacacnnnnnnnnnnnnnntaccaacaaaatccttttaatctttccacaaaataacctctgcttcacaacatcaagactttaagtctccataaactttttacagtttacagcagagaacaaggatcgtccctgcgcatgactgtaaaaaccaaaccaaactttattattgcaatcacacaaatactgcaattaaaaaaaatcaaagagcagttaccccaatgcaaaaaaacagggactgccagactcaatcttagaatggaaacacaaacacactagccccaaaccctaaaacagagattcacaaggaactcagctgacgaacagacgcagcagggcggacaccatggccttggcacctcagggagctcacttagaaacctgacttacgaaaaatcagccatcaaagtttacaacttttggaaatacatgaaacagagaggggccagtggctagggtgcgtcatccattcgccagctttgaaccctggctctttctaatgttcacccatgaagggcccttgttttcactctaaatgctgatcatctgagcgagctgtcttcagggatacctaaggaatcttcagagctaaaaaatgcagcatctagggtcttcttcattgtgcactcatgatcacacacgagaacaaaccaaacttgcagctttttgacacaagaacaagaccttttaaaggaacttctctttagtaacatcttcttgtccaatctcaaagttattttgcacagagtaacagaaacaatttaaatgcctaaaagaactagaggaaaaactggagggaaaaagatacatctgcaggttgaagtcttgagccttgtgaaagatgacccaggagccacctcccttccttcgccttccaatgtccacagctggatcaatcagagtcccagaaatggcacaggtgtgcttcctgctctgagggtacattctagtgtttcatgaaggggaaccgtctgcagatgcgtcaggccacgtagtggtactgattcggattgtctttgtctctctccatatagtctctgtctatcagagattcaattctctttttcaaatctccaggctttactggaaatttcagctgattatataattcagaaactagaagattatgaccaagagtctttctcatcttcattattctgacgatagcagcatcaatctgatattgtctatcctgaaacactctctcagtggtgctaacctgttcctcaacagtttccttcatctgaatttgattgatctttattctaaacaacttgtgcttgaactctccattaaaaatgaacttgtctccatcttccacttcctttcctttgggacttttaatcagcacacgtgctttgccacaggccagggactgcagcgttctgcgcaattcactatcctctatccccgtggccatttttatctcctcaaagctgaagccatctccctcgttgaacatgaggagcaccagtgtctggaagagggacacctggaattccttcttcccttctttaaactccgcttttaaaacagcatgtcccaaagtagtttgccactgaagttttcgaccactgtgctttccaagataaaatgccttaaatacttcctgaagtttaatcatttctggggttaagtgcacttccatgggcgtgtatgttggccagtagcccattgtgagtatgttcactgtgaggtctatagggcctgagtcactctgattctgcatatgctgcttgaaatgaaccatgatgtccttcgaaagctccatgtccttgaacatgccttccagcttgctggtgaaggctgcaccgcactcatgcttgagctttgacaacatagacttttcagcatcgactgaggcacttttcccaacaaggagtctttttgccaaatcttttttataaaatgcttcaaagacatctttaccgtggataaacctgaacaggatcatgatcttgtccaacgtccgctccagctcctcgtctgtggcttctttgttgcctgctcttaactttgaatccacatgctttgcgatcagttctgcaggcttgttgggtctcttgttgatgaacgtctcaaaggactccttcatcaggttgacgaaccgctcattcttctggaagcagacctcgatcacgtggtccaccttgtccttgaagtccaacaggtcttggaccatgtctttgtctttctcaggattgattacgatcgctgttccaaaagtcttgatgtactcgctccagtgctgcagcagcgcctgctgcccgcccctcacccggctgaacagctggtacatctgtgcgaggtccggcactctgttctcatccagtaagtggtcgagccctttctgcagaattgctgttaaatgttctcctaatagctgtttctccacacaagcaatcagtggtttctgtgtgctgtggtccaagtaagtgattactctgtctccctcttcctctaagcgtttacttacatggttaagatattctggaacctctctttcctgcattaacctttggccttcggcagcatataagcaattagtctcttccaaaaatttcagttcaaatgaatctttatacacctgcaggtcagacagcatgcccaggaggctccgcaacaggctccggtccanggcctcgccgctcctctcgcgctcgatcagcagtaggattccatcaatggttttactctgaaccattttatcactaataatatgggttctaaacagttctaatcccatatcccagatggagggcagcgtggagttctgcagcacataggtgcggtccaagaacaggaagatgcttctgatcatgatcatttgtctgcagtggtcctgccagcacgtgttaatcttctttaaaaataaaacactatctagtgagtcttctctaaacggaaggatctgtgcctggacgtggtcttcacaggcctgacgcagttgcttgtagagcattggggagactttgtgagaacagagattttccacagcctgntngagntnctnnnctgcacggcccgcaccgcctcgtgcagcttccgccacgtgtcctgcgtgtagttgtcgggcagccgaggtctgtaatcagaaccgctggcgtcccggctgagaagac

SEQ ID NO: 321 - DNA, 2519 bp, Homo sapiens
  modified_base (26)..(28): a, c, g, or t
  modified_base (30)..(31): a, c, g, or t
  modified_base (513)..(513): a, c, g, or t
  modified_base (605)..(610): a, c, g, or t
  modified_base (612)..(614): a, c, g, or t
  modified_base (804)..(804): a, c, g, or t
  modified_base (806)..(806): a, c, g, or t
  modified_base (808)..(809): a, c, g, or t
  modified_base (812)..(812): a, c, g, or t
  modified_base (814)..(814): a, c, g, or t
  modified_base (1533)..(1533): a, c, g, or t
  modified_base (1823)..(1823): a, c, g, or t
  modified_base (1871)..(1871): a, c, g, or t
  modified_base (1895)..(1895): a, c, g, or t
  modified_base (1898)..(1898): a, c, g, or t
  modified_base (1932)..(1932): a, c, g, or t
  modified_base (1936)..(1936): a, c, g, or t
  modified_base (1938)..(1938): a, c, g, or t
  modified_base (2037)..(2037): a, c, g, or t
  modified_base (2060)..(2062): a, c, g, or t
  modified_base (2470)..(2470): a, c, g, or t
  modified_base (2474)..(2474): a, c, g, or t
  modified_base (2476)..(2476): a, c, g, or t
  modified_base (2478)..(2479): a, c, g, or t
  modified_base (2481)..(2485): a, c, g, or t
  modified_base (2487)..(2492): a, c, g, or t
tttttttttttttttttttttttttnnntnntattaatttcatgtttatttcatacagggtttttgtcaagtttatcagttttaaaatgattaagtcataatcaccattcaaagacaaattttcctctcaaaataataatttccattctgctacctacagtttggcttatcctttggtctgatagccatacttcatctcacaggactatacaagtatgtactatgtacaaaacattttcaagtttgctttcaaatgatacctacaaagagtagatcaagttttcaagtttacagaataccatactacaacaatttaccactataaatatgtcttaacacctgtttattccattctatttagattgcaacactaacaagattcttaatgcatatgtccccaccacctgtactttccctacactatcattttgacacttaacatagaaacaactcaattcagcaaccaagttttacaaccactgttgctaccaatcaaatggtgatgcatcagancccaattctcatgagtattaacatattaagagagtacattatttacctaagactgaatgactgtgccttactttataaaaaaacaaagatannnnnntnnntttaattccatatatatgatactacctattcaatttattaaaaattgtaataaacataataatcaaactagtgctccaaacttatgctgttcacatggaagacaccacaaaagaagacataatatagagacttgccttgcaataagaagtacaaattccttctataaagatggagaaataaaaggacaantntnnttntntaaaagacaattcactgtacacattttatttacagttttgtacactgtcttaatatgaatgggactgcttttctacttgagccatttttaaccaaagcaaaataacctaagtaatacaaagtgttaaaatacagcataaagatacaaaaacagacatactaattctagttaggaatgtaattatgatgttacattttttataatccacaattatgtttaggaaatcacacaaacatagatcactgatttgaatgaaatgcataaatttgtagcaaagctttgtagttacaaaaaacaaaaaaaattaccaaagaatgcacaaaattaatgtttattccacctttgtgtcatattcctggatccttcaccaatgttacatgaggaaaaaaacaaaaaaaatttaagcaaaacaaatgaaaaactgaaatcagaatcactaatattatcaagtagggaaacaaataaattaaaatctagcagccatcagcaagagtacagcaaagacaatgctgtaaaaagaaacaaagaaaattgctagaaaactgtatgcatcataatctttcaaaccagcaaaatatgcttctgcataaaatggaacaacagaattttttttcctgtaaagtatagaaatgccaagttgttttctgactattgtggataggtaaaatctgtatgtaattaatggtaattctactgaactattacagagtgggccaggnaacacatttatggattctggggatgtgtactgtaattctttgattgggatagtggaaactctagccaaaaaaaaaaaaaaaaaatgaacacagaagtacaagacaaaggcgaatgagacttctcttatatctgagtaacattaagatggaaatcaaatttaaatgcagtccactctgctttttgaagaggctttggttcagctcccaaatctcgattgcttgacgcagtctcctatgagaatactcagaaggtgtcttcttaaacaacaaacctatttttagtggtgganccgctcttagtagctgtgtctgcgtgggactgataaccaatcactatnctttggaggaagtcctaacctttnccnttgtataccctccctatatgtgtaacagcttctnctgntntttcacattcagtagtccatattgctatcttatcacctttagctctaacattaacaacagcgccacatacatcatcactgtagtcatcaaaagattctnccaataaggcacagaagtgtctnnnctagccaaaagcgatcgaggtcacttcgtctctgctgtttgttcaatgtaattagccatcgtcctccccgtttgtttttctcatcttcccacataggctcaataccatccttaaaaagtgagtagtcacagccaggcattaaattactagacaactggatatggttgtacagagcccaaaagtcttcaacagtatcaaacttggagatcagccgcaggtttgcttgccaagttttgcttttatcatttttaaaaaaccagagtgcccatctgttctgtaggggatgtttaatatagtgttctgggttagcaacctcctgattagattccgttttctcctcttctgtagtcgggggattaggagtaggggtggtttccggttcgacagtcgccatcttagatcgatctnatcncncnncnnnnncnnnnnncccctcttcggggacgcgcgcgtggcc

SEQ ID NO: 322 - DNA, 647 bp, Homo sapiens
gctcactgagcaccgtcccagcatccggacaccacagcggcccttcgctccacgcagaaaaccacacttctcataccttcactcaacacttccttccccaaagccagaagatgcacaaggaggaacatgaggtggctgtgctgggggcaccccccagcaccatccttccaaggtccaccgtgattaacatccacagcgagacctccgtgcccgaccatgtcgtctggtccctgttcaacaccctcttcttgaactggtgctgtctgggcttcatagcattcgcctactccgtaaagtctagggacaggaagatggttggcgacgtgaccggggcccaggcctatgcctccaccgccaagtgcctgaacatctgggccctgattctgggcatcctcatgaccattggattcatcctgttactggtattcggctctgtaacagtctaccatattatgttacagataatacaggaaaaacggggttactagtagccgcccatagcctgcaacctttgcactccactgtgcaatgctggccctgcacgctggggctgttgcccctgcccccttggtcctgcccctagatacagcagtttatacccacacacctgtctacagtgtcattcaataaagtgcacgtgcttgtga

SEQ ID NO: 323 - DNA, 7560 bp, Homo sapiens; identical to SEQ ID NO: 97

SEQ ID NO: 324 - DNA, 3543 bp, Homo sapiens
  modified_base (79)..(79): a, c, g, or t
  modified_base (98)..(98): a, c, g, or t
  modified_base (124)..(124): a, c, g, or t
  modified_base (453)..(453): a, c, g, or t
  modified_base (468)..(468): a, c, g, or t
  modified_base (478)..(478): a, c, g, or t
  modified_base (487)..(487): a, c, g, or t
  modified_base (502)..(519): a, c, g, or t
  modified_base (521)..(521): a, c, g, or t
  modified_base (531)..(531): a, c, g, or t
  modified_base (535)..(535): a, c, g, or t
  modified_base (562)..(562): a, c, g, or t
  modified_base (1393)..(1393): a, c, g, or t
  modified_base (1923)..(1923): a, c, g, or t
  modified_base (3483)..(3484): a, c, g, or t
  modified_base (3492)..(3492): a, c, g, or t
  modified_base (3495)..(3495): a, c, g, or t
  modified_base (3498)..(3499): a, c, g, or t
ctcgtgccgaattcggcacgagaccgcgtgttcgcgcctggtagagatttctcgaagacaccagtgggcccgtgtgganccaaacctgcgcgcgtggncgggccgtgggacaacgaggccgcgnagacgaaggcgcaatggcgaggaagttatctgtaatcttgatcctgacctttgccctctctgtcacaaatccccttcatgaactaaaagcagctgctttcccccagaccactgagaaaattagtccgaattgggaatctggcattaatgttgacttggcaatttccacacggcaatatcatctacaacagcttttctaccgctatggagaaaataattctttgtcagttgaagggttcagaaaattacttcaaaatataggcatagataagattaaaagaatccatatacaccatgaccacgaccatcactcagaccacgagcatcacntcagaccatgagcgntcactcagancatgagcantcactcagaccacgnnnnnnnnnnnnnnnnnnancatcactctnaccntaatcatgctgcttctggtaaaaatangcgaaaagctctttgcccagaccatgactcagatagttcaggtaaagatcctagaaacagccaggggaaaggagctcaccgaccagaacatgccagtggtagaaggaatgtcaaggacagtgttagtgctagtgaagtgacctcaactgtgtacaacactgtctctgaaggaactcactttctagagacaatagagactccaagacctggaaaactcttccccaaagatgtaagcagctccactccacccagtgtcacatcaaagagccgggtgagccggctggctggtaggaaaacaaatgaatctgtgagtgagccccgaaaaggctttatgtattccagaaacacaaatgaaaatcctcaggagtgtttcaatgcatcaaagctactgacatctcatggcatgggcatccaggttccgctgaatgcaacagagttcaactatctctgtccagccatcatcaaccaaattgatgctagatcttgtctgattcatacaagtgaaaagaaggctgaaatccctccaaagacctattcattacaaatagcctgggttggtggttttatagccatttccatcatcagtttcctgtctctgctgggggttatcttagtgcctctcatgaatcgggtgtttttcaaatttctcctgagtttccttgtggcactggccgttgggactttgagtggtgatgcttttttacaccttcttccacattctcatgcaagtcaccaccatagtcatagccatgaagaaccagcaatggaaatgaaaagaggaccacttttcagtcatctgtcttctcaaaacatagaagaaagtgcctattntgattccacgtggaagggtctaacagctctaggaggcctgtatttcatgtttcttgttgaacatgtcctcacattgatcaaacaatttaaagataagaagaaaaagaatcagaagaaacctgaaaatgatgatgatgtggagattaagaagcagttgtccaagtatgaatctcaactttcaacaaatgaggagaaagtagatacagatgatcgaactgaaggctatttacgagcagactcacaagagccctcccactttgattctcagcagcctgcagtcttggaagaagaagaggtcatgatagctcatgctcatccacaggaagtctacaatgaatatgtacccagagggtgcaagaataaatgccattcacatttccacgatacactcggccagtcagacgatctcattcaccaccatcatgactaccatcatattctccatcatcaccaccaccaaaaccaccatcctcacagtcacagccagcgctactctcgggaggagctgaaagatgccggcgtcgccactntggcctggatggtgataatgggtgatggcctgcacaatttcagcgatggcctagcaattggtgctgcttttactgaaggcttatcaagtggtttaagtacttctgttgctgtgttctgtcatgagttgcctcatgaattaggtgactttgctgttctactaaaggctggcatgaccgttaagcaggctgtcctttataatgcattgtcagccatgctggcgtatcttggaatggcaacaggaattttcattggtcattatgctgaaaatgtttctatgtggatatttgcacttactgctggcttattcatgtatgttgctctggttgatatggtacctgaaatgctgcacaatgatgctagtgaccatggatgtagccgctgggggtatttctttttacagaatgctgggatgcttttgggttttggaattatgttacttatttccatatttgaacataaaatcgtgtttcgtataaatttctagttaaggtttaaatgctagagtagcttaaaaagttgtcatagtttcagtaggtcatagggagatgagtttgtatgctgtactatgcagcgtttaaagttagtgggttttgtgatttttgtattgaatattgctgtctgttacaaagtcagttaaaggtacgttttaatatttaagttattctatcttggagataaaatctgtatgtgcaattcaccggtattaccagtttattatgtaaacaagagatttggcatgacatgttctgtatgtttcagggaaaaatgtctttaatgctttttcaagaactaacacagttattcctatactggattttaggtctctgaagaactgctggtgtttaggaataagaatgtgcatgaagcctaaaataccaagaaagcttatactgaatttaagcaaagaaataaaggagaaaagagaagaatctgagaattggggaggcatagattcttataaaaatcacaaaatttgttgtaaattagaggggagaaatttagaattaagtataaaaaggcagaattagtatagagtacattcattaaacatttttgtcaggattatttcccgtaaaaacgtagtgagcacttttcatatactaatttagttgtacatttaactttgtataatacagaaatctaaatatatttaatgaattcaagcaatatatcacttgaccaagaaattggaatttcaaaatgttcgtgcgggtatataccagatgagtacagtgagtagttttatgtatcaccagactgggttattgccaagttatatatcaccaaaagctgtatgactggatgttctggttacctggtttacaaaattatcagagtagtaaaactttgatatatatgaggatattaaaactacactaagtatcatttgattcgattcagaaagtactttgatatctctcagtgcttcagtgctatcattgtgagcaattgtcttttatatacggtactgtagccatactaggcctgtctgtggcattctctagatgtttcttttttacacaataaattccttatatcagcttgaaaaaaaaaaaaannaaaaaaanaanaanntagcttatagggatataaaaaaaaacttttaggggggggcccca

SEQ ID NO: 325 - DNA, 2489 bp, Homo sapiens
gcacgagggggtagagggaaaagagctccgggccaggggctgccgtcgccgccgtcggggagtcagcccgccagcccgccagctcgtcagcccgccaccagcttcgcgggccctgtcggtcccggtaagcgggcctgcgcttaccggaaagaggagcgtaagatgaaagagtatcagaccaaacattgtctggcttgcactgtaaaactagttagctgaagacgacttctcaggtttcttcaggatgcctgcagcacttgtggagaatagccaggttatctgtgaagtgtgggccagtaatctagaagaagagatgaggaagatccgagaaatcgtgcccagttacagttatattgccatggacacagaatttccaggtgttgtggtgcgaccaattggtgaatttcgtagttccatagattaccaatatcagcttctgcggtgcaatgttgaccttttaaaaattatccagctgggccttacattcacaaatgagaagggagagtatccttctggaatcaatacttggcagttcaatttcaaatttaaccttacagaggacatgtactcccaggattccatagatctccttgctaactcaggactacagtttcagaagcatgaagaggaagggattgacacactgcactttgcagagctgcttatgacatcaggagtggttctctgtgacaatgtcaaatggctttcatttcatagtggctatgattttggctatatggtaaagttgcttacagattctcgtttgccagaagaggaacatgaattcttacatattctgaaccttttctccccatccatttatgatgtgaaatacctgatgaagagctgcaaaaatcttaagggaggtcttcaggaagttgctgatcagttggatttgcagaggattggaaggcagcaccaggcaggctcagactcactgctgacaggaatggctttctttaggatgaaagagttgttttttgaggacagcattgatgatgccaagtactgtgggcggctctatggcttaggcacaggagtggcccagaagcagaatgaggatgtggactctgcccaggagaagatgagcatcctggcgattatcaacaacatgcagcagtgatggcgccaggctctgcagggtgggcctgatcccagagtggtgcttactgtgctgactgtgtacttatcttccccaagagaaaatgcttcttttgagcacactgtacctaccatctgcattgagcagaaagacttttgttttactgaagacaaaagatgtttttattttagacccagaagagaggagtttgctctgaatttgtaaataagtcttccccattcctcatactcgagcctctcctctctggttgcctcctgccaccagcatccatggctcatttgacacctttttaaatatcaggacaagtctgaaacaaagtagtaaaatgtatataactcttacctgttgtcattctttttcttttaaatttgttgctaatctctgataatgaagattcttactctgattctcagctgagctgtgagggcttccagggaaaatggaacaaaatggtgttcttaggtaatgggttgtagatactgagtcttcctttccttttctgacccttctcgaggacatttgctttcctcacacttttgtagtctctctttacatattactatatggaaatgaattgctctgtgctgaaatttgaagaccagataatgaaactgaaaagcaaacaatttttactgaatctgtctaccttcattcatgagaactccagaatgagtgttgaccactgaagcatcttttaagtctgtgttccattgtgccattcaggtttgctgtcacatatgcatcatctgaaatcatttgaaatttttgtacaataaaatatcctggatttgatcctgaaggaaactagtaagatcagatttttgggtcatgtctgttgtattttcagtaatgtgatttcagatggtcatctggattctcccacttctctactccattatttctctacttttccttccagcaaaccttgaaacgtgagggagatggattaatgtgagtaacaggaatgtgtctttaaaaagctagagtggttacatttaatcaggcagtaagataatttgggttcttgagttgttttggagtaatatcccacaactggggtaggaagctcaggacttttttctttaaagctagtcatttcaaaagcatattgtatttttttgaatgactacagtatggacaatttcaaaaaccaaaacccactttggattggtggaagtaaaaactggtaactcactcaagtgaatgaatggtcttgcattttaaaagcttatgggaaactcaatttgaaatgattagaaaatgtcaagtattataagctggtatttaagatgcttgtaaatactatttatgtttttaattttgtaaaataaagatttctttttaaaaaaaaaaaaaaaaaaaaaaa

SEQ ID NO: 326 - DNA, 4417 bp, Homo sapiens
  modified_base (129)..(129): a, c, g, or t
  modified_base (133)..(133): a, c, g, or t
  modified_base (135)..(143): a, c, g, or t
  modified_base (536)..(536): a, c, g, or t
  modified_base (766)..(766): a, c, g, or t
  modified_base (768)..(770): a, c, g, or t
  modified_base (772)..(772): a, c, g, or t
  modified_base (1806)..(1806): a, c, g, or t
  modified_base (2084)..(2084): a, c, g, or t
  modified_base (2350)..(2350): a, c, g, or t
  modified_base (2440)..(2440): a, c, g, or t
  modified_base (2451)..(2451): a, c, g, or t
  modified_base (3109)..(3122): a, c, g, or t
  modified_base (3214)..(3214): a, c, g, or t
  modified_base (3244)..(3244): a, c, g, or t
  modified_base (3296)..(3296): a, c, g, or t
  modified_base (3318)..(3319): a, c, g, or t
  modified_base (3331)..(3331): a, c, g, or t
  modified_base (3337)..(3337): a, c, g, or t
  modified_base (3357)..(3357): a, c, g, or t
  modified_base (3421)..(3421): a, c, g, or t
  modified_base (3542)..(3542): a, c, g, or t
  modified_base (3723)..(3723): a, c, g, or t
  modified_base (4150)..(4150): a, c, g, or t
  modified_base (4356)..(4357): a, c, g, or t
  modified_base (4359)..(4359): a, c, g, or t
  modified_base (4371)..(4378): a, c, g, or t
  modified_base (4382)..(4384): a, c, g, or t
  modified_base (4392)..(4392): a, c, g, or t
  modified_base (4394)..(4396): a, c, g, or t
  modified_base (4398)..(4406): a, c, g, or t
cccttgcctactgctcatgggtgtggagactgatattctggaagactgataggcagatttactattaacaaacacatagtctgtggcccagcaaagccaccccaatccctgcacaagggtaaaaggccngcantnnnnnnnnnagagcactgcagcagcaatgacggagggcacgtgtctgcggcgccgagggggcccctacaagaccgagcccgccaccgacctcggccgctggcgactcaactgcgagaggggccggcagacgtggacctacctgcaggacgagcgcgccggccgcgagcagaccggcctggaagcctacgccctggggctggacaccaagaattactttaaggacttgcccaaagcccacaccgcctttgagggggctctgaacgggatgacattttacgtggggctgcaggctgaggatgggcactggacgggtgattatggtggcccacttttcctcctgccaggcctcctgatcacttgccacgtggcacgcatccctctgccagccggatacagagaanagattgtgcggtacctgcggtcagtgcagctccctgacggtggctggggcctgcacattgaggataagtccaccgtgtttgggactgcgctcaactatgtgtctctcagaattctgggtgttgggcctgacgatcctgacctggtacgagcccggaacattcttcacaagaaaggtggtgctgtggccatcccctcctgggggaagttctggctggctgtcctgaatgtntnnngntgggaaggcctcaataccctgttcccagagatgtggctgtttcctgactgggcaccggcacacccctccacactctggtgccactgccggcaggtgtacctgcccatgagctactgctacgccgttcggctgagtgccgcggaagacccgctggtccagagcctccgccaggagctctatgtggaggacttcgccagcattgactggctggcgcagaggaacaacgtggcccccgacgagctgtacacgccccacagctggctgctccgcgtggtatatgcgctcctcaacctgtatgagcaccaccacagtgcccacctgcggcagcgggccgtgcagaagctgtatgaacacattgtggccgacgaccgattcaccaagagcatcagcatcggcccgatctcgaaaaccatcaacatgcttgtgcgctggtatgtggacgggcccgcctccactgccttccaggagcatgtctccagaatcccggactatctctggatgggccttgacggcatgaaaatgcagggcaccaacggctcacagatctgggacaccgcattcgccatccaggctctgcttgaggcgggcgggcaccacaggcccgagttttcgtcctgcctgcagaaggctcatgagttcctgaggctctcacaggtcccagataaccctcccgactaccagaagtactaccgccagatgcgcaagggtggcttctccttcagtacgctggactgcggctggatcgtttctgactgcacggctgaggccttgaaggctgtgctgctcctgcaggagaagtgtccccatgtcaccgagcacatccccagagaacggctctgcgatgctgtggctgtgctgctgaacatgagaaatccagatggagggttcgccacctatgagaccaagcgtggggggcacttgctggagctgctgaacccctcggaggtcttcggggacatcatgattgactacacctatgtggagtgcacctcagccgtgatgcaggcgcttaagtatttccacaagcgtttccnggagcacagggcagcggagatccgggagaccctcacgcagggcttagagttctgtcggcggcagcagagggccgatggctcctgggaaggctcctggggagtttgcttcacctacggcacctggtttggcctggaggccttcgcctgtatggggcagacctaccgagatgggactgcctgtgcagaggtctcccgggcctgtgacttcctgctgtcccggcagatggcagacggaggctggggggaggactttgagtcctgcgaggagcggcgttatntgcagagtgcccagtcccagatccataacacatgctgggccatgatggggctgatggccgttcggcatcctgacatcgaggcccaggagagaggagtccggtgtctacttgagaaacagctccccaatggcgactggccgcaggaaaacattgctggggtcttcaacaagtcctgtgccatctcctacacgagctacaggaacatcttccccatctgggccctcggccgcttctcccagctgtaccctgagagagcccttgctggncacccctgagaacatgcctacctgctgggtgccgtctgtgcgttccagtgaggccaaggggtcctggccgggttggggagccctcccatnaaccctgtctngggctccaacccctcaacctctatctcatagatgtgaatctgggggccaggctggaggcagggatggggacagggtgggtggcttagactcttgatttttactgtaggttcatttctgaaagtagcttgtcgggcttgggtgaggaagggggcacaggagccgtgacccctgaggaggcacagcgccttctgccacctctgggcacggcctcaaggtagtgaggctaggaggttttttctgaccaatagctgagttcttgggagaggagcagctgtgcctgtgtgattccttagtgtcgagtgggctctgggctggggtcggccctgggcaggcttctcctgcaccttttgtctgctgggctgagggacacgagggcaaccctgtgacaatggcaggtagtgtgcatccgtgaatagcccagtgcgggggttgctcatggagcatcctgaggccgtgcagcagggagccccatgcccctgggtcgtgagcttgcctgcgtatggggtggtgtcatggagcctcatgcccctgggtcgtgagctcgcctgagtatggggtggtgtcatggagccgcatacccctgggttgtgagctcgcctgcatatgcagggtctgtcatggaacatcccaagtctgtgcagcagggagccccatgcnnnnnnnnnnnnnnccctgggacatgaacccacctgcgtggaatgctgtttgtgaggtgtctacagggtttatagtagtcttgtggacacagaaatgcacaggggnacacttacggacacagaaatgcacaggggnaggccgagcataaccaggggtgaggggcaggcagcagttgtagttactgccngcggggcactgctatgtgcagnnggacagccagcncccagncccatcaccactccctgggnctggctggcaggtatggcaccctgggagcccggcatatacccagggcacccctacggctgccgncagtctcatgcccaggtgggtgctctgggctggagcgagggccaggttttgggccgaggcttccccaggcaatcctgtgagctcccttctagcctctgacccagtctggtctggcttgcantggatgtagggcttggggtgggaagttcaggtcctggctttgcctttgcctgatgtggatgagcagctcacatgctcagggccacctgagactgtcactgctctcccctggctactgggaggagtcactgagagcttcgttacccctgctgccttgcccagggcacaccctatacctcctnatctgctcttcccctccctgccgccttctgggcaggtagcagtccctggcctctccccctggctgatcactctccctcaggcagtggagatctgcgtctggacaccctcagatcctgtcattgcctgcccagagtccttcaggggcacccctctgccttggtgtgcggtccagggctctcacccaggtgccgcaccctctggggtcttctgtccagctcccttgccccatgtgctgtcactgactctccttgggactcgcctgcctgctcagagccctgcagggcttggtcagctgcctgttcagtgtcaacacttccctgcacatcttaaaactgggctttattttcgctgaaggaactgtgttgggacccttgacatctgtcaggtttgcacatgctgtttttttttctcagcccacgtgttctnccccacgtggggtagcagcaggacagacagtgaatcacagagtctgccctgagcagaggctgctgtccctgggactcctagccatggtcagactgtacaaaacggttttccagaaatgaaatgtaaatccatttttatactgaaaatgttactgaaagtcacttttatgagcatctgccttaataaacagacattgattcccttannanaaaaaaaaaaannnnnnnnaaannnaaaaaaanannnannnnnnnnntgatgtcgacc

SEQ ID NO: 327 - DNA, 3740 bp, Homo sapiens
cgctgggatggccgccacagctgtaggtgctgctagtgtttagcgctggtctttgccgggcgttgagggcagctcagcctccttgtttgtccggttcgcctgtgcgtggtactcaagggcaccagtattcccgcggtcggcagcatgggtcgggagtcacgccactatcgaaaacgatcggcatcccggggtcgctctggaagtcggtctagaagtcgctcaccctcagacaaaagaagtaaacgtggagatgacagacggtctagaagtagagatagagataggaggagagagaggtctcgtagcagggataaaagaagatctcggtcaagggacaggaagcgtctgagacgttccagaagtagagagagagacagaagccgagagcgaagaagatctcgaagtagagacaggagacgctcaaggagtagaagccggggccggcgatcccgatcctccagtcctggaaataaaagcaagaaaactgagaatagatctaggtccaaagagaaaactgatggtggggaaagttctaaagagaagaaaaaagacaaagatgacaaggaggatgaaaaagaaaaagatgctggcaactttgaccagaataagctggaagaagaaatgagaaagcgaaaagaaagagtagaaaaatggcgagaagagcaacgtaaaaaggctatggaaaacataggagaactgaaaaaggaaatcgaagagatgaaacaagggaaaaagtggagtttagaggacgatgatgatgacgaagatgatcctgcagaagctgaaaaggagggaaatgaaatggagggtgaggagttagatccattagatgcttacatggaagaagtgaaagaggaagtaaaaaaatttaacatgagaagtgtaaaaggtggtgggggaaatgaaaagaagtctgggccaacggtcacaaaagttgtcactgttgtgacaaccaaaaaagcagttgtggattctgataagaagaaaggtgagctgatggagaatgaccaggatgccatggagtattcttcagaggaggaagaagttgatcttcagacagcccttacagggtatcaaacaaaacagcgaaagcttctagaaccagttgatcatggaaaaattgagtatgagccatttaggaaaaacttctatgttgaagttccagaactagcaaaaatgtctcaagaagaggtaaatgtgtttcgattggaaatggagggcattacagttaaaggaaaaggttgccccaaaccaattaaatcctgggtccagtgtggaatttccatgaagatcttaaattccctcaagaagcatggctatgaaaagcccacgcccatccaaacccaagctattcctgctataatgtctggacgagatttgattggcattgccaaaacaggaagtggaaagaccattgcttttctgttgcccatgtttagacacatcatggatcagaggtcattagaggaaggagaggggccaatagctgtcatcatgactccaactcgagaactggctttacagattactaaagagtgtaagaagttttccaagactttgggacttagagtggtctgtgtttacggaggaacaggaatcagtgagcagattgctgagctgaaaagaggtgctgaaattattgtttgcacacctggtcgaatgattgacatgttagccgctaacagtggtcgggtcacaaatcttcgaagagtgacatatgttgttttagatgaagcagacagaatgtttgacatgggttttgaaccccaggtcatgcgcatcgtggataatgttcgtcctgatcgacagacggttatgttttcagctactttccccagagctatggaggctttggctcgcaggatcctcagtaaacctattgaagtacaagttggaggcaggagtgtggtttgctcagatgtggagcaacaagtgattgtgattgaagaagaaaagaaattcttgaagttacttgagcttctaggccattatcaagagtcaggatctgtcattatatttgtggataagcaggaacatgctgatggtcttcttaaggatttaatgagagcatcttatccttgcatgtctcttcatggaggcattgatcaatatgacagagatagcatcataaatgactttaagaatgggacctgcaaacttcttgtggctacctctgttgctgcccgaggtctagatgtgaaacatctgattcttgtagtaaattatagctgccccaaccattatgaggattatgtacacagagcagggcggactggaagagcaggaaacaagggttatgcttatacttttatcacagaggatcaagctcgctatgctggtgacataattaaagctcttgaattgtcagggactgcagtacctcctgatttagagaaactgtggagtgatttcaaagatcagcagaaagctgaggggaaaataattaaaaagagtagtgggttctctggtaagggattcaagtttgatgaaacagaacaagctttggctaatgagaggaagaagttacaaaaagcagctcttggtctacaagattcagatgatgaggatgctgcagttgatattgatgagcaaattgaaagcatgtttaattcaaagaagagagtaaaggatatggctgctcctggaacatcaagtgttcctgctccaactgcaggaaatgctgagaaattagaaattgctaagagattggctcttagaatcaatgcccagaagaatttgggcatcgagtctcaggtagatgtgatgcagcaggccaccaatgcaattcttaggggtggcaccattctggctcccactgtttctgcaaaaaccattgcagaacaacttgctgaaaagatcaatgccaagctcaattatgtgccgttagagaaacaagaagaagagagacaggatggtggacagaatgaatcttttaagagatatgaagaagaattagagatcaatgacttcccacagactgctaggtggaaagttacctctaaggaagctctgcagagaatcagtgaatactctgaagccgcaattacaatcagaggaacctacttccctcctggcaaagaacccaaggaaggcgagcggaagatttacttggcaattgaaagtgccaatgaactggctgtgcagaaagcaaaggcagaaatcaccaggctcataaaagaagagctgatccggctgcaaaattcataccaaccaacaaataaaggaagatacaaagtcttatagacatccggaaaaaagatttttacctgtgctggtctatgatgtatgtggcagttgctgtctgcagtttacaatgtattgtaaatgaagattttttaaattctatcttgctgattttttttaaatataagaaactggtacttggtaaagaaatctgtccgtaagtacccccacaatcagtcaaactatatttaaagccagcctgttttcagagtatgatgtcctttaatgtaaactcaaatatcaatattttaaatgtccggataatattctagaggtttaaaaaatggaaatatttgaactttctattgaagacaataaagtacacaagtcgttaaggggctattcactttatcctgtactttcaatgaaattgtgatcatttcctaagaaaaggtaaaattcactatcatattttgtgtccccaccttgatgttacatgactctggaacaatatgaactggatttaagaatgttataatagaagtcttacaaaatgg

SEQ ID NO: 328 - DNA, 5255 bp, Homo sapiens
cgaccccagccaccgccctgcggccagcgcgtcccccgactcgccgcccggagaccccgaggctccaacgagttcagaaatgtccagaaatgacaaagaaccgttttttgtgaagtttttaaagtcttcagacaattccaaatgtttttttaaagctctcgagtccataaaagaattccaatcagaagaatatcttcagattattacagaagaagaggcattgaagataaaggagaatgatagatcactttatatctgcgacccttttagtggcgttgtctttgatcacctcaaaaagcttggctgcagaattgttggtcctcaagtagtcatattttgtatgcaccaccagcgatgtgtcccaagagccgaacatccagtttataatatggttatgtctgatgtaaccatatcttgtacaagtctggaaaaagaaaaaagggaagaagttcataaatatgtacaaatgatgggcggacgagtatacagagaccttaatgtatcagtaactcaccttattgcaggagaagttggtagcaaaaaatatttagttgctgcaaacctgaagaaacctattttgcttccctcttggataaaaacactttgggagaagtcacaagagaaaaaaataactagatatactgatataaacatggaagatttcaagtgtcctatttttcttggttgcataatctgtgtgactggcttatgtggcttagacaggaaagaagttcagcaactcacagttaagcatggaggtcaatacatgggacaattgaaaatgaatgaatgtacacacctcattgtgcaagaaccaaaaggtcagaagtatgagtgtgccaagagatggaatgtacactgtgtgaccacacagtggttttttgacagtattgagaaaggtttttgtcaggatgaatccatatacaagacagaacctagaccagaagcaaagactatgcccaattcttcaactcctaccagccagatcaacacaattgatagtcgtactctttcagatgtcagcaatatttccaacataaatgcaagttgcgtaagtgaatcaatatgtaattcacttaacagcaaactggagcctacacttgaaaatctagaaaatctggatgtcagtgcatttcaagcacctgaagatttattagatggttgtcggatatatctttgcggttttagtggcagaaagctagataaactgagaagacttattaacagtggaggtggagttcgttttaaccagctaaatgaagatgtaactcatgttattgtgggagattatgatgatgaattgaagcagttttggaataaatcagcccacaggcctcatgtagtgggagcaaagtggttgctagagtgtttcagtaaaggttatatgctttctgaagaaccatatatccatgctaattaccagccagtggaaattccagtttcacatcagcctgaaagtaaagcagctcttttaaaaaagaagaacagcagcttctctaagaaagactttgctcctagtgaaaagcatgagcaagctgatgaagatctgctctctcaatatgaaaatggtagctccacagtagttgaggctaagacgtctgaagccaggccctttaatgattctactcatgctgagcccttgaatgattctactcacatttctttgcaagaagaaaaccagtcttctgtcagtcattgtgtccctgatgtttctacaattactgaagaaggcttatttagccaaaagagtttccttgttttgggttttagtaatgaaaatgaatctaacatcgcaaacatcataaaagaaaatgctgggaaaatcatgtcccttctgagcagaactgttgcggattatgctgtggttcctctgctggggtgtgaagtggaagccactgtgggagaagttgttacaaatacatggctggttacttgcatagactatcagactttgtttgatccaaagtcgaatcctctcttcacaccagttccagtaatgacaggaatgactcctttagaggattgtgttatttcatttagccagtgtgctggagcagaaaaagagtctttaacattcctagcaaacctccttggagcaagtgttcaagaatactttgttcgcaaatccaatgcaaagaaaggcatgtttgccagtactcatcttatactgaaagaacgtggtggctctaaatatgaagctgcaaagaagtggaatttacctgccgttactatagcttggctgttggagactgctagaacgggaaagagagcagacgaaagccattttctgattgaaaattcaactaaagaagaacgaagtttggaaacagaaataacaaatggaatcaatctaaattcagatactgcagagcatcctggcacacgcctgcaaactcacagaaaaaccgtcgttacacctttagatatgaaccgctttcagagtaaagctttccgtgctgtggtctcacaacatgccagacaggtcgcagcctccccagcagtaggacaaccacttcagaaggagccctcgttacacctggatacaccatcaaaattcctgtccaaggacaaactcttcaagccttcctttgatgtgaaggatgcacttgcagccttggaaactccaggacgtcccagccaacagaaaaggaaaccgagtacgccactctcagaagttattgtcaaaaacttgcaacttgctttggcaaatagctctcgaaatgctgtcgctctttctgccagccctcaactgaaagaggcccagtcagagaaggaagaagccccaaagccacttcacaaagtagtggtatgtgttagtaaaaaactcagtaagaagcagagtgaactaaatgggatcgcagcctctctaggagcagattacaggtggagttttgatgaaacagtgactcatttcatctatcaagggcggccaaatgacactaatcgggagtataaatctgtaaaagaaagaggagtacacattgtttccgagcactggcttttagattgtgcccaagagtgtaaacatcttcctgaatctctttatccacatacttataatcccaaaatgagcttggatatcagcgcagtgcaagatggccggctctgtaatagtcgactactctcagctgtgtcttcaacaaaggatgatgagccagatcctttgattttagaagaaaatgatgtagacaatatggccaccaataataaagagtcagcaccatcaaatggaagtggaaagaatgactctaaaggagttctgacacagaccttagagatgagagagaactttcagaagcagttacaggagataatgtctgcaacatcaatagtgaaaccccaagggcagaggacttccctttcaagaagtggttgtaacagcgcatcttcaacccctgacagcactcgctctgctcgcagtggacgaagtagagtcctagaggcactgaggcagtctcgtcagacagtacctgatgtcaacacagagccttcccaaaatgaacagatcatttgggatgaccctacagcaagggaggagagagcaaggcttgccagcaatttgcagtggcctagttgtcccacacaatactctgagcttcaggttgacattcaaaacttggaggattctccttttcaaaagcctttacatgattcagaaattgctaaacaggctgtctgtgatcctggaaacatacgtgtgactgaagctcccaaacacccaatctctgaagaactggaaactcccataaaagacagccacctgatccctacgcctcaagcccccagtattgcctttccactcgccaacccccctgtggctccgcaccctagagaaaagattataacgatagaggagactcatgaagaattaaaaaaacagtacatatttcagttatcatctctgaatcctcaagaacgtattgactattgtcatctgattgagaaactaggtggattggtgatagaaaagcagtgctttgatcccacctgtacacacattgttgtgggacatccacttcgaaacgagaagtatttagcctcagtggcagctgggaagtgggtgcttcatcgctcctaccttgaagcctgcaggactgctggacacttcgtgcaggaagaagactatgaatggggaagtagttccatacttgatgttttgactggaatcaatgtacagcaacgaagactagcacttgcagcaatgagatggagaaaaaaaatccagcaaagacaagaatctggcattgttgagggagcatttagtgggtggaaggttattttacatgtggatcagtctcgagaagcaggcttcaaacgccttcttcagtcaggaggagcaaaggtgctacctggtcattctgtacctttatttaaagaggccacacatcttttttctgacttgaataaactgaaaccagatgactcgggagttaatatagcagaagctgctgcccagaacgtgtactgcttgagaacagaatacattgctgattatctcatgcaggaatcacctcctcatgtagaaaattactgtctaccagaagctatttcatttattcagaataataaggaacttgggactggattatcacaaaagaggaaagctcctacagaaaaaaataaaatcaaacgacctagagtacactaatcgcatctaccctttagttaccaaacattaaatgtttttaaaaattgaaagcctgaatgtgactgtgatagatttgggtagtaatttaaagatgagtacctgaagaattctgcttcagagtataatgatgacccttcttgagttttgaacacctgaaattgtaatcactgaaatattaactgtttcttaataaaaagttacctgaaataacaacaaaatacaactcctcagctagcttgctgttaaaccacattgaagtctgttaaaagatatttatttttcttgtaaatatctgaagctgtagcttagtggaaattttagcaaggtaatggattttgctttaaaatgtctgccttacaaattcataacaacaagatttgtcagtcagcatttattcatgttttccctgatttttatcttctcaccattttacctcttttaacaggagcctgagcacaaggtttaatgaggaagctggggctataaatatgtgtgtatatatgtatatgtatgtttgtacaaatctccatgatgtttgccaagtttgaatgcgcaaaacttggaaaatgtgacaataaagaataaaagtagtaactcaaattagtat

SEQ ID NO: 329 - DNA, 736 bp, Homo sapiens
cgagctggagaggtggtcggagaagtaggaacctcctgccgggctcgtggcggcttctgtccgctccgcggagggaagcgccttccccacaggacatcaatgcaagcttgaataagaaaaacaaattcttcctcctaagccatggcatatcagttatacagaaatactactttgggaaacagtcttcaggagagcctagatgagctcatacagtctcaacagatcaccccccaacttgcccttcaagttctacttcagtttgataaggctataaatgcagcactggctcagagggtcaggaacagagtcaatttcaggggctctctaaatacgtacagattctgcgataatgtgtggacttttgtactgaatgatgttgaattcagagaggtgacagaacttattaaagtggataaagtgaaaattgtagcctgtgatggtaaaaatactggctccaatactacagaatgaatagaaaaaatatgacttttttacaccatcttctgttattcattgcttttgaagagaagcatagaagagactttttatttattctagaattgcagaaatgactacactgtgctataccagagaattccagtagaaagaaacttgtaactctgtagcctcttacatcacctttattatacagcatgaaaaaccataacttttttttaaggacaaaagttgttgccttcctaagaaccttctttaataaactcattttaaaactctg

SEQ ID NO: 330 - DNA, 2162 bp, Homo sapiens
  modified_base (909)..(909): a, c, g, or t
  modified_base (1400)..(1400): a, c, g, or t
  modified_base (2051)..(2053): a, c, g, or t
  modified_base (2056)..(2056): a, c, g, or t
  modified_base (2072)..(2074): a, c, g, or t
ttttttttttttttttttttttttttttttttttttttttttttttttttttttttttttttttttttttttttttttttttttttttttttttttttttttttttttttttttttttttttttttttttttgtgtttcaacaaactttatttatgaacactaaatattcatgttaattttcaagtatcataaaagtctttaaaaaaaaacatttaaaattataaacacaattcctagctcacaggccataaaaagcaggcagcaggctggatttgatccacaggccatagttggctgtctcttaaacaggcttttatacgttatgcaaagtgtttcaaattccagagactttggagacttttcgttttttagatttctcattttaaaacacacataatacaagttttctttctggatcaatatactcacgagagaaaataattcagaaaaaaataaaattccttacttaaaaaaagggaaaagctatagaacaaatgtttcgtcttaaaatatatttaggaaatgtaaaattaaagattaaaaattttattctatgcaacataaaataatatgcataaatctggcacataatttctttgtttttactttagaaaaaagacagtaagaaaaaagtttataaatttctcagtcccttttatacaaagttgcaactaaaaccagcaatcacttatatgtacaaccatcaactctgaatacaatgtgaattatacctaggaactgtaatttacctagatgagttctgcctgctttatgaaaaacacacacttatatcacagaacaccgtggcttctacaatttgtaacaattttgaaaacgaaactcctgcctccataatataaggaaacaagagtactctttccatagtcatcatcctgtataaaaaaaanttcatagtctgatttacctttgtcaaaggtaaaatgattcacatttgcttggattactctgatcctcagtagttcctaaacacaaaataaagtttgcatgaacctttatctgggttttccaaagcaagtattatgctggcagaagtccatgagctgaataaaaagatactaaatataaaaggtttaccaactttatcctttcttaattttacgatagcttcaggtattgagacctaactggtttcctgtgcctatccattgtgaacacatctcaatcttctacttttaacactcctcagcaccatattttcgttgtttctttattgtgcgacgtagaagatcctttcgtccaacttcaatcatttgttcttcccaagacttcatttcattatgataacgagtttcgtcctctttagcatgctgaatatataattccttttcagagtcagacagatttttccagttttcctttacagtcttcagcttttccntgcggtgaatcacccttagcttcttggaatctttcagctacataaacgttataagctgaacgaggtctttttggttttccaagcagtgttaactcttttttttttgtcatagctttcctttttaaatgtttgtccatgatttctttttccaaagacataatctgacttggagttagctgttctttaaatctgcttatctcttctttatatacctgccactccgccctataagcatcttgatatatttttttctttgaatcaggaagttccctccaacgctgggcaattcttctaattagttctgtagtttttgcatctgggttctgagctttaaatatgggtagttgttctttagaaaatcgaaggtaagaacttacaggtttctttggacaacttgccaagacagatgaaaaccacctcggtaaatacacaaaactgaagggggagcgcagtcgacttccacagccggtgcacagctctgctccagaccttcccagggcactcagcacgccccacatgcttcggagaaacgccatcgctccggtggatgaggcagtgacccgaccccaatctcggagagcctcctggcaatacacaactccagcaatcacaactggaacccgcgtgcgaccctccggcgtgtgttatcannnccnccactagcgaggcacnnngggaaatctgctaacatccggtcggtagatggggacggggcggggcggaattgcgcaggcgcgggagagcgtaccccggtgggcggcc

SEQ ID NO: 331 - DNA, 2672 bp, Homo sapiens
  modified_base (14)..(21): a, c, g, or t
  modified_base (409)..(409): a, c, g, or t
  modified_base (437)..(437): a, c, g, or t
  modified_base (457)..(457): a, c, g, or t
  modified_base (513)..(513): a, c, g, or t
  modified_base (524)..(524): a, c, g, or t
  modified_base (2659)..(2660): a, c, g, or t
  modified_base (2668)..(2670): a, c, g, or t
tttttttttttttnnnnnnnngcaatttacaggctcaatatatttttttacactttgcttgaaagaaaatttcaatattttacagtctttcagtaggcattatatacactgcactttatgaaatctaaaaggtattgaaataaatttttccaacattttggtaacaaaacaaacaacgtttctccaaatacttgtgctatctacatgatgtttgctctgataatcactaatcaaaacaaacaacgtttctccaaatacttgtgctatctacatgatgtttgctctgataatcactaatcacaaaaaactgactcaatggaataattagaaaaattgtctaacaccatgcatgggtttcaatcatttttaatatcctatcctagaaacattctacaaatcttaagatttnaaaaattaagtctctgttctgatttttnaaagatacctttttatgacnatatccataacattgacaggtacatgttaaggctagtatcatccccttttttgaanttttttgactntttttttttttttttaagaaagatagtaaaagccagactccctttagggctttgaactgtacctacagaaaatcagagtgcagtgaacataatgttcagtcctacagtcaggatgcagttgctccttcccattccacaagatactgcacctttccatcaagtgtcacccgacgtgccaaaactcggtatttttcgccacatgctattctacctgcagcaccaaaataactggtaatggagttctttagatgattgagttgtaactcctgatctgctaagttattcagaatctctgtgttgagttcatcaaactgataatcttctttgccttcatcatcttttacaatttctgagttctgagtctggagtgctcttcttggaagacgacctcttcttctccgcaaatgtggtattgcagcaggccaagatcttcctgtacgcgttctttttctggagtcagataatccataatgcctggaaatgctagacgaggtagtttcttttgcactggaagcacccgtgaaatccacatctgaggtattggatgaatgtgcagttccctcagttctccctatagaacaaggtaaatccaaagtaggattctctgaaattgattccttatccaaaagtggctcagcagttttttgaatcatttttcttgtatatgggccaggtggacgacctacagattttttctttccttttttttctatgccattgcttacttcccttgaatcagatataggtttggatgcctttctgcctttaattttaaattcatgagatgttccttcaggttctttctctgctttgaaagccacatttggtggcacaggaggaacacgaattcgcaacccaaacaaatgcttcttcttctttatttctttcccagacataaacatggtcttgtaatcatttaatgcctccagaacatgctcatatctttcagattttggtgtgtctgccagctctccagggtgcaatctatcccagttttcattaatgtatgtcataagctcaagttcagaatcaaagtatttcttcttatgaataacacttaggttgtaaaggcataggtgtgctatatctacccactgtaatggtagacgtttgaggtattctggtccagaactgcagacagagcatataaacgtataaaatctgtctccaaatagcattggcttttgaaggcattgcacacaagcctcatgaaaccactgcttacatttgcagcactgtagcatcttcaaataccagtctccagggcctccacaatagcagtaacactgctggacattggttttatgacctgcatcccattcaaggtctgccacactatagggtaatgtctgcttcatgacttgcaatgctttggcatttggtcctttcttaagtgcaccacccctctttgttgttgttgcaaaaacacactgccgacagagccatttttcatctgaatcaatcacactggaatcaatatgaggtgtgtgacacaactgatgatatccttggccacacttgtcacatataaccatttcattgggagcttctgaatactcttcttgacatattgtacagaccatttccccacttccagtggctcctgcctgtttgaatgtccttccagagaacccaggatttagaactgtcttcaaatatgatgaagcagctctgtttcaatatgtttatctttttgatagtgccaagataaaacaagccatctgaccatctagctaggacatcctgaccctcttcaaatttacatgctggctttttggctttatgtccatcctgtaaagacagcttggtcaaggatgttggggtcttttggtttcgacgtaaaggagaccgcttgtggaccagtgaattacctgcccctgtagagtctctcattcggtcacttcagtggtgccaaccgcttcatacaggaaaaaacaaccaatccgtccccgtgggcgcttcccctgcgagtccgagcacttactgggcacccgccccaccgggtacccggcacatatgcacgcacaaaccgaggtccttggagacaagggttgggggtagaatgagcgttcttacaccggcctcaaacacagcccacttcaatacagcccctcgccattttggtttcccgcggnntgccgtcnnngc

SEQ ID NO: 332 - DNA, 647 bp, Homo sapiens
gggcgccgccatcgccgtcatgctgggcgccgctctccgccgctgcgctgtggccgcaaccacccgggccgaccctcgaggcctcctgcactccgcccggacccccggccccgccgtggctatccagtcagttcgctgctattcccatgggtcacaggagacagatgaggagtttgatgctcgctgggtaacatacttcaacaagccagatatagatgcctgggaattgcgtaaagggataaacacacttgttacctatgatatggttccagagcccaaaatcattgatgctgctttgcgggcatgcagacggttaaatgattttgctagtctagttcgaatcctagaggttgttaaggacaaagcaggacctcataaggaaatctacccctatgtcatccaggaacttagaccaactttaaatgaactgggaatctccactccggaggaactgggccttgacaaagtgtaaaccgcatggatgggcttccccaaggatttattgacattgctacttgagtgtgaacagttacctggaaatactgatgataacatattaccttattttgaacaagtttccctttattgagtaccaagccatgtaatggtaacttggactttaataaaagggaaatgagtttgaactg

SEQ ID NO: 333 - DNA, 622 bp, Homo sapiens
ggcacgagctcgtgccggccttcagttgtttcgggacgcgccgagcttcgccgctcttccagcggctccgctgccagagctagcccgagcccggttctggggcgaaaatgcctgcccttcacatcgaagatttgccagagaaggaaaaactgaaaatggaagttgagcagcttcgcaaagaagtgaagttgcagagacaacaagtgtctaaatgttctgaagaaataaagaactatattgaagaacgttctggagaggatcctctagtaaagggaattccagaagacaagaacccctttaaagaaaaaggcagctgtgttatttcataaataacttgggagaaactgcatcctaagtggaagaactagtttgttttagttttcccagataaaaccaacatgctttttaaggaaggaagaatgaaattaaaaggagactttcttaagcaccatatagatagggttatgtataaaagcatatgtgctactcatctttgctcactatgcagtcttttttaagagagcagagagtatcagatgtacaattatggaaataagaacattacttgagcatgacacttctttcagtatattgcttgatgcttcaaataaagttttgtctt

SEQ ID NO: 334 - DNA, 2707 bp, Homo sapiens
ggcaggccgagccagccgtgcgccgcgctccagggcccagggcgccgcacacgcacccacccacccacccagcctcgcagcgccatgggcaagaacaagcagccacgcggccagcagaggcaggggggcccgccggccgcggacgccgctgggcccgacgacatggagccgaagaagggcacgggggcccccaaggagtgcggggaggaggagccccggacctgctgcggctgccggttcccgctgctgctcgccctgctgcagctggccctgggcatcgccgtgaccgtggtgggcttcctcatggcgagcatcagctcctccctgctagtcagggacactccattttgggctgggatcattgtctgcttagtggcctatcttggcttgtttatgctttgtgtctcatatcaggttgacgaacggacatgtattcaattttctatgaaactgttatactttctgctgagtgccctgggcctgacggtctgtgtgctggccgtggcctttgccgcccaccactattcgcagctcacacagtttacctgtgagaccacactcgactcttgccagtgcaaactgccctcctcggagccgctcagcaggacctttgtttaccgggatgtgacggactgtaccagcgtcactggcactttcaaactgttcttactcatccagatgattcttaatttggtctgcggccttgtgtgcttgttggcctgctttgtgatgtggaaacataggtaccaggtcttctatgtgggtgtcaggatatgctccctcacggcttccgaaggcccccagcaaaagatctaacattcttgctcaaagttgcgagagaaagtagcacatggagtagctgaggttaaacaaacaaaaaaaaattttaaacaaagaaaggaaaaaaattgacaataaaagtcactcttctaattgaatatttttatatttttatgaaacaaaagagcatttcttcaggtttctattgtattttttttaacattcttgcagagaaagcaagatccaaattgattttgggatattaaaagttaacagaacactgaacaaggaaagaatggcatagatctatctttacagtctggagttaattcctgttaactcattttatccattccttacataatcttctttcctgttagtccagtttgatggtgtgaatggtgaatttcaggcccagttgctaaattttgtggcatcttcctctagtccttcccacctccagtcatcagccccactctgtcttggagacaggcaggaggtgggggaagagctgaatctctttattttccctggtagagacatcttcaaggcatgaaatagcttaaagagcagagtagaaatggaagaggctttgcaaaaggctagataactaacaacacctgggttggggcggcggcctcttctcttcagctcccttagcttggctccgtaagtggatcacttgccaaatgctttagatgattgcctctcaataattgaaaggtggtggtagttgtattctaaatgatgtagaaggtttaaaaataattacattatgcttctattctatcatctaaaacaaatcattaaaactaatttctagctaattgttaattataattatgctcagaagtctatttaatgagctctgactgtacttacgctgcactgtcggtgttaagagaaattactctcacaagagcagaggcctgaagattctttcttctgaaagccaagcaccacaaggaaaaaaaaattattaatagctcaggttaaaaacacccatttaaacaaaaacaagagcatttgtaataggaagtgtttatacaaacagcacatttgtgatatgttgaaaagcatctctcttggcaaccaatctatgtttgaggaagattgggtaatgctgatgtgttccattcatgaaactgtatttgatacataatcctattattaattcgtatgcttagtcaacctaggaaatcaaaataatgttttgaagttcttatttgagcaatatggccttgacttggagggtagttttagttgttttgtttttaagtgactgtggtttaaagcacaaatgccccaaggtggggagacttctctctgtgattattgttgctattaaattctgaactgtatccatattttaaggaaggagctaaaaatggaaattcatgaaacataaatggtatcaagaactttatcagtatgctttgttgaaagcagaaattaagataataattgagttcaattcgcctctccgcattgcctattgatacactttactaatcatgaaattctaacctaaaaggaaaacattttcctgcttgtcttagaagaaagtggaataattccactgattgtgataatggtttcaatttctacacaatataaatatccagtataaaggaaagcgttaagtcggtaagctagaggattgtaaatatcttttatgtcctctagataaaacacccgattaacagatgttaaaccttttaatgttttgatttgctttaaaaatggccttcctacacattagctccagctaaaaagacacattggagagcttagaggataagtctctggagcagaatttatcacacacaaaagttacaccaacagaataccaagcagaatgatgaggacctgtaaaataccttgtgccctattaaaaaaaaaaaaaaaaaaaaaaaaaaaaaaaaaa

SEQ ID NO: 335 - DNA, 917 bp, Homo sapiens
aggaggcagtagttccccgcttcccttccgcgggagggagagttagctagccatccaagaaaacaccatgaaagataacgatatcaagagactactgtatacccatcttttatgcatattttcaattatcctaagtgtcttcattccatcactcttcttggagaacttctcaatattggaaacacacttgacatggttgtgcatctgttctggttttgtaactgctgtcaatctagtactatatttagtagtgaaaccaaatacatcctctaaaagaagttcattatcacacaaggtaactggatttttgaaatgctgtatctactttcttatgtcttgtttctcctttcatgtaatttttgttctgtatggagcaccactgatagagttggcattggaaacatttttatttgcagttattttgtctacttttactactgtgccttgcttatgtttgttaggaccaaacctcaaagcatggctaagagtgttcagtagaaatggagttacatccatatgggagaatagtctccagatcactacaatttctagctttgtaggagcatggcttggagcacttcctattccactggattgggaaagaccatggcaggtatggcccatctcctgtacgcttggagcgacctttggctacgtggctggccttgttatttcaccactctggatatactggaatagaaagcaacttacatacaagaacaattaactggagcaaagggagatatttctttgtgcagattctgtaagggctgggcagaaatgtgtatggtcaaagccaagcagttccatttacagctctgttttttacgtagttacaacatgatgtgattgtagctttttaaactatgaaacccctgagagattgtaccttctagttgaaataaagtatttataat

SEQ ID NO: 336 - DNA, 7639 bp, Homo sapiens
  modified_base (3159)..(3159): a, c, g, or t
  modified_base (3439)..(3439): a, c, g, or t
  modified_base (3933)..(3934): a, c, g, or t
  modified_base (4633)..(4633): a, c, g, or t
  modified_base (4946)..(4946): a, c, g, or t
  modified_base (5191)..(5191): a, c, g, or t
  modified_base (5265)..(5265): a, c, g, or t
gggccttgcgccgcgggagcggacggcggcggaggagaccctaggctcgcggcccgaggcgggagggctcggcttctcgactgcccgcctccgaggccgccggccgcttctctctcccagagtggccgccgcccctggagactcgccgtgacacgggcctaagccgccgccgcgggagtcctgaccgctcggacccgtcggatcaggccgggtgggagcgagcttgcgggcaggtgccgctcccggagggtgggccggaggcgaggcgcccaccgcgcggctcgcgggccgggctcggcggaggggccgctcgcgcagcacccccaccgcgggccggagcccgggtcgccgccccgccttctcccgggaccgcccggccggagctgcgggggccgagggacgccgcgcccgccgccgccagccgggctcgcgcgggagagcagggaagagaaactttgccttttattgtttttagtccttaagtgcaaggaactctgtgttgggaggaaaaatgtccttcttcagtttccgtaagatcttcaagttggggagcgagaagaagaagaagcagtacgaacacgtgaagagggacctgaaccccgaagacttttgggagattataggagaactgggcgacggagcctttgggaaagtgtacaaggcccagaataaagagaccagtgttttagctgctgcaaaagtgattgacactaaatctgaagaagaacttgaagattacatggtagagattgacatattagcatcttgtgatcacccaaatatagtcaagcttctagatgccttctattatgagaacaatctttggatcctcattgaattttgtgcaggtggagcagtagatgctgtgatgcttgaacttgagagaccattaactgagtcccaaatacaagtagtttgcaagcagactttagatgcattgaactacttacatgataataagatcatccacagagatctgaaggctggcaacattctctttaccttagatggagatatcaaattggcggattttggagtatcagctaaaaacacgaggacaattcaaagaagagattcctttattggtacaccatattggatggctcctgaagtagtcatgtgtgaaacatctaaggacagaccctatgactacaaagctgatgtttggtccctgggtatcactttaatagaaatggctgagatagaaccacctcatcatgaattaaatccaatgcgagtgctgctaaaaatagcaaaatctgagccacctacattagcacagccatccagatggtcttcaaattttaaggactttctaaagaaatgcttagaaaagaatgtggatgccaggtggactacatctcagctgctgcagcatccctttgttactgttgattccaacaaacccatccgagaattgattgcagaggcgaaggctgaagtaacagaagaagttgaagatggcaaagaggaagatgaagaggaggaaacagaaaattctctgccaatacctgcaagtaagcgtgcatcttctgaccttagtatcgccagctctgaagaagataaactttcacaaaatgcttgtattttggagtctgtctcagaaaaaacagaacgtagtaactctgaagataaactcaacagcaaaattcttaatgaaaaacccaccactgatgaacctgaaaaggctgtggaggatattaatgaacatattaccgatgctcagttagaagcaatgactgaactccatgacagaacagcagtaatcaaggagaatgaaagagagaagaggcccaagcttgaaaatctgcctgacacagaagaccaagaaactgtggacattaattcagtcagtgaaggaaaagagaataatataatgataaccttagaaacaaatattgaacataatctaaaatctgaggaagaaaaggatcaggaaaagcaacagatgtttgaaaataagcttataaaatctgaagaaattaaagatactattttgcaaacagtagatttagtttctcaagagactggagaaaaagaggcaaatattcaggcagttgatagtgaagttgggcttacaaaggaagacacccaagagaaattgggggaagacgacaaaactcaaaaagatgtgatcagcaatacaagtgatgtgataggaacatgtgaggcagcagatgtggctcagaaagtggatgaagacagtgctgaggatacgcagagtaatgatgggaaagaagtggtcgaagtaggccagaaattaattaataagcccatggtgggtcctgaggctggtggtactaaggaagttcctattaaagaaatagttgaaatgaatgaaatagaagaaggtaaaaataaggaacaagcaataaacagttcagagaacataatggacatcaatgaggaaccaggaacaactgaaggtgaagaaatcactgagtcaagtagcactgaagaaatggaggtcagaagtgtggtggctgatactgaccaaaaggctttaggaagtgaagttcaggatgcttctaaagtcactactcagatagataaagagaaaaaagaaattccagtgtcaattaaaaaagagcctgaagttactgtagtttcacagcccactgaacctcagcctgttctaatacccagtattaatatcaactctgacagtggagaaaataaagaagaaataggttctttatcaaaaactgaaactattctgccaccagaatctgagaatccaaaggaaaatgataatgattcaggcactggttccactgctgatactagcagtattgacttgaatttatccatctctagctttctaagtaaaactaaagacagtggatcgatatctttacaagaaacaagaagacaaaagaaaacattgaagaaaacacgcaaatttattgttgatggtgtagaagtgagtgtaacaacatcaaagatagttacagatagtgattccaaaactgaagaattgcggtttcttagacgtcaggaacttcgggaattaagatttcttcagaaagaagagcaaagagcccaacaacagctcaatagcaaactacagcaacaacgagaacaaattttccggcgctttgagcaggaaatgatgagtaaaaagcgacaatatgaccaggaaattgagaatctagaaanacagcagaaacagactatcgaacgcctggaacaagagcacacaaatcgcttgcgagatgaagccaaacgcatcaaaggagaacaagagaaagagttgtccaaatttcagaatatgctgaagaaccgaaagaaggaggaacaagagtttgttcagaaacaacagcaagaattagatggctctctgaaaaagatcatccagcagcagaaggcagagttagctaatattgagagagagtgcctgaataacaagcaacagctcatgagagctcgagaagctgcnatttgggagctcgaagaacgacacttacaagaaaaacaccagctgctcaaacagcagcttaaagatcagtatttcatgcaaagacatcagctacttaagcgccacgagaaggaaacagagcaaatgcagcgttacaatcaaagacttattgaggaattgaaaaacagacagactcaagaaagagcaagactgcccaagattcagcgcagtgaagccaagactcgaatggccatgtttaagaagagtttgagaattaactcaacagccacaccagatcaggaccgtgataaaattaaacagtttgctgcacaagaagaaaagaggcagaaaaatgagagaatggctcagcatcagaaacatgagaatcaaatgcgagatcttcagttgcagtgtgaagccaatgtccgcgaactgcatcagctgcagaatgaaaaatgccacttgttggttgagcatgagactcagaaactgaaggagttagatgaggaacatanncaagaattaaaggagtggagagagaaattgagacctaggaaaaagacactggaagaagagtttgccaggaaactacaggaacaggaagtattctttaaaatgactggggagtctgaatgccttaacccatcaacacagagccggatttccaaattttatcctattcccagcttgcattccaccggatcataacaaagggaagcattctgtgcgtgggtttggctctttcagtatgtcattctgttctcatcttctgccacagtctctcagatagctcatgaagacaatcacctgcctcaccttctaggtgttttccttttttgttttttttgttttgttttgtttttaagcaaagatgaagggaaaacgaactaagacagacgctaggccatgttggcaaagtagcatcttggtgactaaggtgactttgtatattcatcttaaaaattatgttctttagacactgctacctgaaaactgttggagaaataatgtttaaagttatttaagaaaaactgttacatcactaagtattaataaattcttcttacctgacgtaacttctcaatgcctaaattctgtagttgaagctctgctgcagagagttgggataattttcttttggtggatcagctctcataaaaaagctatgatttgctcaaatatgctgttgactcagtaaatgaatatatttttttntttaaataggaacaacctcttttaaaagagaaaaattatttcagtgatttgtcaaaacgaattacctcttttggcatgagctaataattgagggtgctaattttcttaagatagtgcctaaaacactaaatttcagtcaagtcgtaagtaggattttctttttgatcaacagggacaaaaacatctttagaattaaaaacatggttgttttggaatttttgcttctcttaccgtttgatagaaattttcatcctaaaatacatgtacaaagtttggaaagatgaaaaaaagaggtagcttttagattgcaaantggaaatgtaaaactcatgaaatttaagcaatataggtttagctatctgtgtttattttctaaaataatacctgagctggttaaatgatttctctccatcttagctaattctgtttaaaactctgtcagaggcctgcaggctgtgagttatatttataaatatatcttcagaaattaatcttaaaagaggcattagttcagaatacttttttaaaagtttaaattaaatatttaggcacgtcagnaattacttttccttattttgaaatgaggctacttatgtcttggttttattttgttccatgtttaaatcattcantttgatttgagtgggaaaagcctgaagcctttatcatgtggttgctggtgtgtgtaattattaatgaaatgttcactcctagtcccttatgaggcttagaatttcaaccacgtgtcaggtcagacagtattataaactgtactttgctgtctgagacagcacatttgtgaatgatgcttgctgcctgccattttcaacctattctctcttaagagtgctaggtaccaaattgtgaaagtttgttttcagttatattacttttgaggctggtgaaaaatttaaatgtaactttgtgggaacactgattcatatttagaaaatgtaaatgtctgtagcactttcttgcagttaatttgaaaactttggatgctgaaccttgtttgtcagtgatttagatgatttaaaaatgcatgtgtgatttgaattttataattgttttgacaagcataatttacttggacaacttcgtaggtagccttaacttctggccaagtttgttttttatataaatatatatacatatatacatattatgtatggttgtaaattcatacacttatcacatgaatgtgttactgtatacaaaactcttaatgctttattctcaaatgctgggttgaaaaatgttttgaaagccttttaaaatatatatctttataaagtaatattcaggatgatgataaaaattgtttatattgttatgataaaaatgacagtataatgttgcccagtgtatttaatgatttatttgaagagggattgggaaggaacgtcttcataccactttctcctttgaaattttcagtttattgacttttaaaaaatgaatacctcaggcagtagacattttttttctagtatcatttaattgataccctgtgcgctaaatagtgtgtggtgcctgattaatttggtctgaatatttgattctttctgttcctttcaacttgacattcagattattgactcaaggagagaggctcagagtggaatggttggcgctgtgggtaaggttggatctcccttaaaactgccttttggattcagtgtttgtgcttgagttcgctttcaaatatgaccataatcgtgtgggtgcaagactgtacagtgatacatatgtagaggtaaagcattcattttaatacttaaagttatataaatcttttcaaaaagtgttttgttataaaatacgctgtttgtacccataccagcccacctcttctgaggccctgtattcaaatagatgatagtgatctatctttcctgcatgaagtgtaggtggcgagtgggcgaggggcgcagacttctttgaaatcgaagggtacagtcaaatctactgctgatttggttgttttgttgctgtggcagaatatgccatgaaacacatacagacttctccgaacgtgcaccctcatcagccacctcctcccctctttccctgagtgctgtgaacacagcagacctgcacacttctgcagatccagctcctacagcttggggcactaggctgcctttcctagtcctgtcaacaaccatacagtgcgaattgctgaattagctgctattctatgtggagtcacattaagctttttcttatctttttctatggggaagctatagggtgggtaaggaaaaaatgttgaatgcttttactttgctgaaaatattagaactctcttgtgacaggatacagcaaattataattaaatataaattaccagaaccagagctacctctaagtcatacttcctcaagcacaaagctctcaggcatatgagacccaccttaatgaagggtctctgatttcttgagcatcagcgagtttcagaagtgactatttttttgtactcttctagtttccttgtaactatacactttttcccattccacactgtgcttaaatgacaaagactcttctgagaagccaaattctgtccaagtattaactagagatattgttgattaaagaaaatctagaactgaagtgaaagaagagagttccagttctaatagtcttttgattaacaattcttttctgagaaatgatttttataagaaatggggtgattctttaaatgcttttcttaagttgaaggcacaacagttaatggctgtattgttgctattccgttgctgacatgtttttgataaagctttaacattcctgctactaattttggcggagagtgtttgccaggtttcaatgtgggctgcagctttttgtgctccttctctggtttgcagtgtaatgagttcataagctaaattttcagaaagaattttgtttaagattatgcctcttatctacttgagagcaacatgtcttttcaatcatgggattgacacatgaaaaataaagttatttcttaatcaa

SEQ ID NO: 337 - DNA, 1552 bp, Homo sapiens
ggcacgaggagaggaccccagagagccctgagcagccccaccgccgccgccggcctagttaccatcacaccccgggaggagccgcagctgccgcagccggccccagtcaccatcaccgcaaccatgagcagcgaggccgagacccagcagccgcccgccgccccccccgccgcccccgccctcagcgccgccgacaccaagcccggcactacgggcagcggcgcagggagcggtggcccgggcggcctcacatcggcggcgcctgccggcggggacaagaaggtcatcgcaacgaaggttttgggaacagtaaaatggttcaatgtaaggaacggatatggtttcatcaacaggaatgacaccaaggaagatgtatttgtacaccagactgccataaagaagaataaccccaggaagtaccttcgcagtgtaggagatggagagactgtggagtttgatgttgttgaaggagaaaagggtgcggaggcagcaaatgttacaggtcctggtggtgttccagttcaaggcagtaaatatgcagcagaccgtaaccattatagacgctatccacgtcgtaggggtcctccacgcaattaccagcaaaattaccagaatagtgagagtggggaaaagaacgagggatcggagagtgctcccgaaggccaggcccaacaacgccggccctaccgcaggcgaaggttcccaccttactacatgcggagaccctatgggcgtcgaccacagtattccaaccctcctgtgcagggagaagtgatggagggtgctgacaaccagggtgcaggagaacaaggtagaccagtgaggcagaatatgtatcggggatatagaccacgattccgcaggggccctcctcgccaaagacagcctagagaggacggcaatgaagaagataaagaaaatcaaggagatgagacccaaggtcagcagccacctcaacgtcggtaccgccgcaacttcaattaccgacgcagacgcccagaaaaccctaaaccacaagatggcaaagagacaaaagcagccgatccaccagctgagaattcgtccgctcccgaggctgagcagggcggggctgagtaaatgccggcttaccatctctaccatcatccggtttagtcatccaacaagaagaaatatgaaattccagcaataagaaatgaacaaaagattggagctgaagacctaaagtgcttgctttttgcccgttgaccagataaatagaactatctgcattatctatgcagcatggggtttttattatttttacctaaagacgtctctttttggtaataacaaacgtgttttttaaaaaagcctggtttttctcaatacgcctttaaaggtttttaaattgtttcatatctggtcaagttgagatttttaagaacttcatttttaatttgtaataaaagtttacaacttgattttttcaaaaaagtcaacaaactgcaagcacctgttaataaaggtcttaaataattgtctttgtgtaaaaaaaaaaaaaaaaaaaaaaaaaaaaaaaaaaaaaaaaaaa

SEQ ID NO: 338 - DNA, 5985 bp, Homo sapiens
  modified_base (321)..(321): a, c, g, or t
  modified_base (1124)..(1124): a, c, g, or t
  modified_base (1128)..(1128): a, c, g, or t
  modified_base (1134)..(1134): a, c, g, or t
  modified_base (2260)..(2261): a, c, g, or t
  modified_base (2264)..(2264): a, c, g, or t
  modified_base (2266)..(2277): a, c, g, or t
  modified_base (2768)..(2771): a, c, g, or t
  modified_base (2934)..(2934): a, c, g, or t
  modified_base (3042)..(3042): a, c, g, or t
  modified_base (3122)..(3122): a, c, g, or t
  modified_base (3233)..(3234): a, c, g, or t
  modified_base (3695)..(3695): a, c, g, or t
  modified_base (4080)..(4094): a, c, g, or t
  modified_base (4097)..(4097): a, c, g, or t
  modified_base (4100)..(4100): a, c, g, or t
  modified_base (4132)..(4133): a, c, g, or t
  modified_base (4137)..(4138): a, c, g, or t
  modified_base (4140)..(4143): a, c, g, or t
  modified_base (4146)..(4158): a, c, g, or t
  modified_base (4241)..(4241): a, c, g, or t
  modified_base (4320)..(4320): a, c, g, or t
  modified_base (4582)..(4582): a, c, g, or t
  modified_base (4772)..(4772): a, c, g, or t
  modified_base (4794)..(4794): a, c, g, or t
  modified_base (4853)..(4853): a, c, g, or t
  modified_base (4876)..(4876): a, c, g, or t
  modified_base (4912)..(4912): a, c, g, or t
  modified_base (5379)..(5380): a, c, g, or t
  modified_base (5486)..(5486): a, c, g, or t
gacagcggaggatggaagcgagaccggggctggaggcgggccgaggccgcgagttgagcctcaggaagcagaaggggcgcggaaagatgcgattgacgtcgcaagcgaaccaatgacgagcgagctgtggcaggcctccagccaatgggcagtgaggcctgacgcggggggcggacgctggggccgagggtagcttgagcgcggcggcggcgttgttcagtcagagcgagaacattccagaggtcgcccagctccggcgctgacgggtgtggaccgcggacgtcgctgggacagcccctccccgctgctcggcggcggcanctggcccggccgctcctcgctgcgcttcgcctccgcctcctcggactcggactcgggtttatatcgcgcctcacttcatcccagtcccgggcgagcagcgttgggtttatgtctttatttgacgaaaacgagctgttgcgcagccattggtacctgtattggggaaacatagcatacaagcaagaagcttacagcctcagtggcgaaaattttttcatgtcagagaccgagaactcttgcagtcgtttatgtcatcccttcttctccagacagaagataccaaaaagttgcaatcaaagatctcttcatcttattgataaagccactaataagccaaaatgtctgtcaatgtcaaccgcagcgtgtcagaccagttctatcgctacaagatgccccgtctgattgccaaggttgagggcaaaggcaatggaatcaagacagttatagtcaacatggttgacgttgcaaaggcgcttaatcggcctccaacgtatcccaccaaatattttggttgtgagctgggagcacagacccagtttgatgttaagaatgaccgttacattgtcaatggatctcatgaggcgaataagctgcaagacatgttggatggattcattaaaaaatttgttctctgtcctgaatgtgagaatcctgaaacagatttgcatgtcaatccaaagaagcaaacaataggtaattcttgtaaagcctgtggctatcgaggcatgcttgacacacatcataaactctgcacattcattctcaaaaacccacctgagaatagtgacagtggtacaggaaanaaanaaaaanaaaagaaaaacagaaagggcaaagacaaggaaaatggctccgtatccagcagtgagacaccaccaccaccaccaccaccaaatgaaattaatcctcctccacatacaatggaagaagaggaggatgatgactggggagaagatacaactgaggaagctcaaaggcgtcgaatggatgaaatcagtgaccatgcaaaagttctgacactcagtgatgatttggaaagaacaattgaggagagggtcaatatcctctttgattttgttaagaaaaagaaagaagagggtgttattgattcatctgacaaagaaatcgttgctgaagcagaaagactggatgtaaaagccatgggccctcttgttctaactgaagttctttttaatgagaagattagagaacagattaagaaatacaggcgccatttcctacgattttgtcacaacaacaaaaaagcccaacggtaccttcttcatggtttggagtgtgtggtagcaatgcatcaagctcagcttatctccaagattccacatatcttgaaggagatgtacgatgcagaccttttagaagaagaggtcatcatcagctggtcggaaaaggcctctaagaaatatgtctccaaagaacttgccaaagagattcgtgtcaaagcagaaccatttataaaatggttgaaggaggcagaggaagaatcttctggtggcgaagaagaagatgaagatgagaacattgaggtggtgtattcgaaggctgccagtgtaccgaaagttgagactgtaaagtcagacaacaaggatgacgacatcgatattgatgccatttaaagggatggatgcaacctagcttaacagtataatgctgcaaattttcctccattatcagccagaagtgcaacatgtatgtgcaaaagctaaaatggcttaacatcatgctacactttacactaaaaatctattactgtgagtggtctgttattaagcccaatgagacatctagggagtccatacacatcagtgagcagatgtagtttgcttatttatagcatgtttctttttgaaaaactagtggtggacacatttggatcacatttatacagttataaaaataaaggtttgattttggtcgttcnncanannnnnnnnnnnnaatgacttaagctgaagtaactggctccttactttaaatgttctgccatcatttcacctgatgagcattcttggagcctgccagatattgttaggtcctggggctgcaaagaggtcctcaacaggatgtaaagcaaacttaattgtaattaatttattcagcccattaagaaagtactaaagttttatctctgtagttcctcaaattggcatctggtaatgtacattgtgaggtagactgataatgaaatgacagtgcaacatcttaaccaagaagtaaatatgacctcagtgtcctataaataatgtaagagcaggatttgaaacttggagagctgttttctcatttcatgtacacttgccccaaattgtctttgaagtcgtgtgcattgcacgttggatgagccagggaaattattacattaacaagcattttgtgtgtacgtagtagttactttgtactgagagaacttgctttggggtgcaattaannnntaaactgattttatttgggagaaacaaggaagggtgcacttaactagcaacctaagcatgatttttcagcttttgcccttagggtttaaattacaattccaaaatgttagacatactgtattttttcgttcagtgtggctttaattttcccctcttgcagttngttctgtaatgccttttacatttggacacatagtttatgctttttagattttggttgctttcttgccaaaataagtgttaactgtgtttcaaacttgattttctttcntttttcttttttttttcttccagaatgtcttatttaaaaagaaagctaaaagcatacttctaagtcagagcctctatttnggtgtaagacttgggatattttttacttcacattgaatatagccaggcacccaagaagtctgatggccacctgagtgcaggtgacaaggacctgacagagcccatgcaggnntttagatttggacacacaagagttgataacttcctcatgaactccttgcctgatctaaactcatattatgggttctgactgtttgagtaatcatcttcaaggttaaacctcttggcagttacccttttcacaaagtgcacagtgggaatcgagaatcgatagggttaattttggagcagtggcttataccattcacctctgtttttttgtgattatttcacagataatgagaccttaataacaaataggcgtaaaaaaattttcacattgaaatgatagaaacatttgatgtaataaaacttggttggcttgatattttaaggaattgaaacctagcaatcttattggagagacaagaattggtctccagctgcctttgatcaagattcgggtgcaagtggagcaggagccatatacctggagggaatgtgctttgtcacaccaaagaggatttttttttncttcaaacttgtatgttgcctaggtttcaaattctttgccgcaaggctgatctgctttcattaactggaattctgtaggagatactggtgacctaagctaagttgcactcagcatactcagtgtcaagctaatgaggttctattataaaggttctacttttaatctgagggaaaacatgttcagggcttctagaacactaaaaaatttggcttaaaccagtgttcagtctggtgccaaacttcgaatggaatacaaattcacataatctgaactttgttcacaggttatcctaatagagtaattcttcactttgctctattgaactgtcttaaggatttgtttaaacagctaagttacttgattaaaataatgataaaattgtannnnnnnnnnnnnnnaanatnaaagttaacaagttttcattttataatgagannaaannannnnaannnnnnnnnnnnngtagccgttgctttggatttgtgttggatgtatcctgcagttacacttgccagccccactcacaaaagttgttcatttcattngggtcactggctttatttgctagtcttgtctgtgaactgagcatctgcctcagttttattacttgaaatcttggcaggngcttaatagggaacatacatacagctatgtaactgtgaataattgtatatatctctagttaagaatgagggaatggggaggtttgctttctaaacaagtgcattctgaaattgacttaaaaatttttagtgtgggtcctaaagtttagagatgggcaaggaggtctctaatccaccgcttcccgcttgagaagggaggggtatcaaaattgagccccaagctgtttgttccagtgtaccaagcactgactttatgcctttgncctggagatggcagaagtgaaagctggccatctgcaaaaagcagataagtgagtttgaaccttttgcattttgttagctcagtcagtcctcatcgtggtcctgaggcataggtactgttgtaccaaggtcacttatctaacaaaataacccttcatgtattttaaatttatttgacaagtctgcagacanatccttatctaaccagctattntcttaattgctacagcttgacctaccagtattccggagtaaccagcaaatgcaaagttnaccttgttcctgcatcatctttntgatggttcaaatttcagcctccctgactactacanagccagagcagtcttagtaccagaaacagtgttgcactttcgttgcatgtgctgtgtgaccccaaggggacagggagtcactttggtcatctctgtccccagtacagatcttgattcatagtgacattccataagtggggtgacagcaaatgacttgcaggtagtctcattgtaggtttgtgcaccagagtgaccctgtgagcctttgttaataggttgggagctcagggtgtttatgtccacctgtctggtctagccaaacagtttttttctgggaatcaaatttctgtggtttttatggccagaaattttaaggacttgtgtgtgctgggatatgagaatagaagctacagagttcttttcttgggacctagactgggaggtgcaatgtcaggacctccaggtgaatggtaggatctgagttgaccctgcagttcggttatgcagtcaattatttctttttaagnngaggaggattcacttgggtgttgggatcaaatttggattctgtcccaggccttactgtaaaactaggggattgcctttccatatctgctgggggtggagacccttntgtgcagcactcaatcccactggaagcctaatgctgcagtcagaagcaatgcctggctggggcagtaggggaaattccacccaattttgctatgagcctaaaacctctttaaaaacggtcagttaactaaaaaataaaaatcaagtctttaggagagtagaaaacacaattaactaaaaagcagggacatctgaaagagacgtattaagttaacatttttaaaaatccaaatgaaagtaaatggaataaatgtatcaggtaaaggacaagttgtaagcttggatttttaggtctagcaatacactgtttacaagagcatcacctaaaatgtgacaaaagatgttgaaaggatgaaaaaaggtatagtagacatacactaaccaaaaatgtagctctttgaatctcagaaaaaagtagattttaataaagtgtgaaagttgtcaatcaaaaaaaaaaaaaaaaaaaaaaaaaaaaaaaaaaaaaaaaaagggcggccgct

SEQ ID NO: 339 - DNA, 975 bp, Homo sapiens
cccaccaccagcgcagcagtcctggagctgacccattccaacaatctcgtaaaacatggtggattactatgaagttctaggcgtgcagagacatgcctcacccgaggatattaaaaaggcatatcggaaactggcactgaagtggcatccagataaaaatcctgagaataaagaagaagcagagagaaaattcaagcaagtagcggaggcatatgaagtgctgtcggatgctaagaaacgggacatctatgacaaatatggcaaagaaggattaaatggtggaggaggaggtggaagtcattttgacagtccatttgaatttggcttcacattccgtaacccagatgatgtcttcagggaattttttggtggaagggacccattttcatttgacttctttgaagacccttttgaggacttctttgggaatcgaaggggtccccgaggaagcagaagccgagggacggggtcgtttttctctgcgttcagtggatttccgtcttttggaagtggattttcttcttttgatacaggatttacttcatttgggtcactaggtcacgggggcctcacttcattctcttccacgtcatttggtggtagtggcatgggcaacttcaaatcgatatcaacttcaactaaatggttaatggcagaaaaatcactacaaagagaattgtcgagaacggtcaagaaagagtagaagttgaagaagatggccagttaaagtccttaacaataaatggtaaggagcagctgctgcgcttggataacaagtaattcaacgcacgcacttaacagaaatgttaaactataacaagcaccatttgaggattaacaggaacatttttttgaagatttcaaacgaactcgactttcagtataattgtacctaaagtatttataaacagctcatcggagcctctatttgtcatagacttttgagttgattgttgggaccacataataggacat

SEQ ID NO: 340 - DNA, 975 bp, Homo sapiens; identical to SEQ ID NO: 339

SEQ ID NO: 341 - DNA, 5964 bp, Homo sapiens
  modified_base (139)..(139): a, c, g, or t
  modified_base (141)..(141): a, c, g, or t
  modified_base (143)..(144): a, c, g, or t
  modified_base (148)..(150): a, c, g, or t
  modified_base (1137)..(1137): a, c, g, or t
  modified_base (1163)..(1163): a, c, g, or t
  modified_base (1704)..(1704): a, c, g, or t
  modified_base (1739)..(1739): a, c, g, or t
  modified_base (3369)..(3369): a, c, g, or t
  modified_base (3555)..(3555): a, c, g, or t
  modified_base (4354)..(4354): a, c, g, or t
  modified_base (5181)..(5181): a, c, g, or t
  modified_base (5207)..(5207): a, c, g, or t
  modified_base (5264)..(5264): a, c, g, or t
  modified_base (5358)..(5358): a, c, g, or t
  modified_base (5375)..(5375): a, c, g, or t
  modified_base (5461)..(5461): a, c, g, or t
  modified_base (5515)..(5515): a, c, g, or t
  modified_base (5563)..(5563): a, c, g, or t
  modified_base (5631)..(5631): a, c, g, or t
  modified_base (5825)..(5825): a, c, g, or t
  modified_base (5903)..(5911): a, c, g, or t
  modified_base (5914)..(5922): a, c, g, or t
  modified_base (5930)..(5934): a, c, g, or t
  modified_base (5936)..(5937): a, c, g, or t
  modified_base (5939)..(5940): a, c, g, or t
  modified_base (5950)..(5951): a, c, g, or t
  modified_base (5956)..(5958): a, c, g, or t
  modified_base (5960)..(5962): a, c, g, or t
tttggtttcattgtaaatacatatgatttattaaaaatataaactgatggtattctctataaattattccccaaacacattaaaagatgtgataatagatataaatttgcaaaccatttatagccaccctccccctttnantnntttnnntttttttttttttactgtaggtttatttttattcaaaaagttactgtctcaagacataaatacaaatcagaaaacagtacaattaggacaatagaatgtggaggacaacaggttagagtaatatataaaacatttttagctggttgaaaacaaagctgtaagaactgctttcacaaagaagtactcctttcaagagtgagaaaaaaaatcaacttaggtttaaaatcatatatacagtcctctcagcagttctagttaatgcagtggtgtgtaaaacaacataggcaatacttttgcacataacaatatttgttgatggaaaatctgttagacaagtctggattcatttgttattaaccatgacttaataaaataattgtatcatgatctttttagctaacctatggtttttggctaccacagcccaatgcttgatttctgactaaaaactgaaagccttttggtattcacccatctgaagatattcttgtattgcaagcatattaaggcatggaatgattaaaataatatacctcaagaactgagagacgactgacaatagatagatacacatgtaatataagttaatattttgttttaaacgatgtctagctgcctaagcctcgcaaaatgagttgatgtcaaaatggcaagtagccactttctgttttaaactaatttatttgtgaaaggacataaaatgaagtttaaagcttagctttcaaagaatattatgggttatgaattctattatcccatctaatttacatacagaggaaatgtactgtaacctgttagaagtatctttaacctgaagactgcttgcaaagacagatagataaaacaatataaaatacaaatttaaaaatcattttaaagcatgaacactcatgcttttctatttttaaacattgttaaactttcaatatatttctgaaacctcataattttaagttggaatttaaaagtaagaaaaaactaaacaanctgcgcaattataaaatcagcaccantttatatatatatataattttatttaaaatttagatccctattcccacactctaataagctgtataatttttgtttagaatttttctgcaaacatactacaataagcttcttttatttggagacaaaatacagtggcattactggaaggaatatcacaacattacatttttatcttaaaggacaagcaaactttcagggttgataatgggataagcatgtttgagactggttaccttctggcagttcactgcatctggatatttctgaaaagtatagagaagctcttggattttaaaaatatcttaaaatacttttagatgaaaaaattgtaaaagttctgcttataagtttacttttctccacaattacaatatttaaaacaaagttttgttgattgacgttttaagcatttaaatttagaatgctaaaaacaattctatcctacactttcttcagggtaggggaataaatacatccttaacattgttttctggatgtaaacagaaatccagcagaggtcatcattatttagtacaaccnagtaaataaatgtaagagaattcatatctgtaccnaatgcctcttcagattgttattttgttttttttttttttttaaaaaaaagcatgaaataatcgattcaaaagccaactaacagcgcataaataaaatatttactttctaagaaaaactgtagcttatcatcaaattgtttacttgtcctttacgtttattcaggcaaacaaaactgcccctcaatgcacttgatcttggtaagcataagcatgtcatattctccttagagaaaaatctgtacagaatttcactgtatctaccacactttaaaatttcctcttccacttagaaaatgacttcaccacagatttaattgtgtactggtattaaaacattgacactccaagaactgattcatccataattgaagctggatcaaagaaatcaggcttcagttctgttctctctcgtctgttctttgatggtggcaaatctatatccatggtgtcaaaatccattccctcattaagatcctcaatcctcccttctgaggacatcataacatcttccacaattggctcttcatcatcttccattaggcttgtgccacgccgattataatcaagaggtgtttgatgatgttcagtctgcattggataaacactcatgaagctatcctcaggccgtaatcttttgggctctctcataatagtggaggtgagttgtggtgtctgcatcataacaggggtgtgcagtgtttgttctctgcttaaccacatactgtcactactactactttcttcagtgagtgaaagctgcatgccctcaaccactttccgttttcctgtagatggttttgattttttactccgtactgttgacccccggctgctgattccactaatgactgacatggtgtcatcatcaccaccagctagcaaagaatttcggtaagacatcagtggaagccacacatcctctcttcggagtgacatctgaaaggtcatgaacttttccaagtaaacatacactgttcttttgtcttgtcgaagtagtttagaagaaaattcactcagaatatcaagaaatgccaaatttaaaggtggatggctctccccttgcggattaggctctttaaaagcaaattctatgccatctttgtgtagcatggcaatggcttctcttgttttcaactgatcaagtccaaaagttaaagcaaaacgtcgagcaagttcttttatgccactaaatgtagaggatgatctatcaaaattatagccattttcttgtatcatttcattaaaaagctgttgcagactgagaataagggtcttagcacactgaattttgtctatctgccttgttttactcattgtttctttgatgatatctccatagtcattataatacttcatatactgtttgaagatatctgcagctgtattcatctccaccacagtatatacaattagcttacaaaatgctgcaagtaaatttcttctcttgtgcagagcttcaattttactggcttcatcctcttgctgaccatctgcactattattatcatcatcctgttcaatgaagacatgatccaaaataaagctgagcaactcagactgcaatgaagaatcaggggtatacactaatggctctaacatgtcacgccctcctgacataatctgatggctngaagatcatcaaaatatcacacagaatagtgaaggcctgttccttaacagtagtattcacgttggtcaggtaatgttgacatatctgacaaaatactctcatttgtttctttaaacgcagcaagtcctcctttgtagagctgctttcagttatcttagcaagttgccaaaggattacatagtgagnacactgcagtgcgtgaataacaatctgctcaggcatgtctccattttcgattccagttttcaagagtttgtaattacaagcaaataaatcccactttgaaaggtcatgggcattatgaaaagcagtgatcctcttcaatgttgacaatacctgatatgcatcatcttcatcaggttcttcaccctcttgcagaaaatcttcaagaagccggttaaatttatctgccaattcatctatcagttgacttcttgaaatatctactctgttgaagattgtgaactcttcattacagagtgcatggtaagttttagaacatgcttccaaaacatctgtatctgtgtgcttctctacaatattccggatctgtcgcaataaggcatccaaatgcttttctaatcgtccagtggtatatatttccaaatcaaagtactgaggcaactgcaacaagttagtcaccttttctgcatctacagagtattttgctaataactgaggaagggccacggcaaaaagctcagtgatttttgtcctatcatccaactgtgtcttcttctcctttgctgtaagcaccctttttcctgtccctcttcccacgggaggatgacattcagccgcttgtctaatggtacaaagcattatttcaatcagagcactctcttgcctatctgttagtgcttcctctccactaagtggctcttccagtaacaagctattcatacattcccagtctttcagcagctcagtagcacagtcccacatgctatccacaaggtatgctgcatgctcatgtaactcactnttctagaaagaaaaaaaccaatgtcttaacaaggttggcatttggaccttgtcttcctcttcttttcatcattccatcctcctctggatctctacgactgaagagctttttgtagagaaattctccagctgctactgctactggccggtgagctgaataaaccagatgatagacattttcacaatcttctgcagtgagaacttcttcactactctgtaaaacaagagtgagtaattttattgcttgtactgcaacatcatattctttgtcaagggtcatagacacaattctatccttgaaccgactggtaaaaagttccagtttggaattaagctctttgttataataaagcccttgtagagcagtaagacatttgagtcttacttcaccttgcttatcatgcatagtccaaccaacatattttaaataactgtcattaagaaaggcatcactatacatcttcatccaaatgccaatctcttcaatgcaaatagctcgaatttcagctatcgcatcacggtatctatgtacaaacactcctttaaatattgcattcatcatattttctatttcatcttgattttcctgaagctctttccgcttttgtagcaggagttctagcctctcattggctcgttttccaatcattttattccgttctgcttcatattgtctttgtgtattatccatattaatgctaagatttagtgccacattcaccaaagctgtcatcaacttcatagctgccagggtgcttgtatgtcgaaatgctctgacttgtgagtcagacaatcctgtaagaagtgaaatgactgtatccatcatanactcatcatatatgatactatattgncattgccgtactaacacgccaatgaattcacaaaaactggatttgaacttcttccantgaggaccagccatggtaagtggataatctccactatcctcatcgaattcttcagtcatttttcgaattatctcagagttctgcatatgtctanacatttctgctgtgacnactcctttacagcctgaacactgaataaaaaagttgataaggtcaagaagtgctatatctcggtcatgcttgtatgattctatccnatcatctaccaccgactgcatagcactcttgcccattttaacaacttcaaacancatcatgttttccactccattctgttggtgatgaccattcattcggtntggaccagaaggaggttttcctcctccatttccacctttgcccttttctgctgggccctttttgcctntttttacaagttttgcctttgccttgcttttggttttttccttcgatatcttcaaaatctgtgtcagaagaaaaatgtgtttctgactcctgtagtagattaaaatcagttggtatttctggagctgctatcatttctttatcatcttctggaacacctcaatgtcagaaatatattcatatatttacgtgggntaaaatggtggcttgccttctttcttctaagacaattccgaagtcgggcctcggaagggatggagagatcgatgccannnnnnnnnccnnnnnnnnncccccacnnnnngnngnngatgatgggnnggggnnnannnag

SEQ ID NO: 342 - DNA, 688 bp, Homo sapiens; identical to SEQ ID NO: 185

SEQ ID NO: 343 - DNA, 1288 bp, Homo sapiens
aaggaacgccggctcttcgcctctcagcgcggcttgtcctttgttccggacgcccgctcctcagccctgcggctcctggggtcgctgctgcatcccgcacgcctccaccggctgcagacccatggccgagcgcggggaactcgacttgaccggcgccaaacagaacacaggagtgtggctagtcaaggttcctaaatatttgtcacagcaatgggctaaagcttctggaagaggtgaagttgggaaactgcggattgccaagactcaaggaaggactgaggtgtcatttactttgaatgaggatcttgcaaatattcatgatattggtggaaaaccagcttcagtcagtgctcctagagaacatccatttgtcttgcaaagtgttggaggacagacattaacagtatttactgagagctcatcagataagctgtcattggaaggaatagtggtacaaagagctgaatgccgaccagctgccagtgaaaactacatgcgattaaaaagattgcaaatagaagagtcttccaaaccagtgaggctatcacaacagctggacaaagttgtaacaaccaattacaaacctgttgctaatcatcaatacaatatcgaatatgaaaggaaaaagaaagaagacggaaagcgagctcgagctgataaacaacatgttttagacatgctattttcagcctttgagaaacatcaatactataatcttaaggacttggtggacatcacaaaacaacctgtggtgtacctgaaggaaatcttaaaagaaattggtgttcagaatgtaaaagggatccacaaaaacacatgggagctgaagccagagtacagacactatcaaggagaagaaaagagtgactaagaagactcctagccagcatgctagtgaaacgactagcagcgatgctatgcaaaaggcgctgatactggaaggcttgaacaccgtatgttaataggggttaagtgacagtactttgatttctctcggtaaattttttaaacctgtaattcttgtaaagtttcttaactgtttttttgaggagaaagaacagatttatttatagacttaacttgtattaaaccagattattcacagtaggaataggggttggaggattaagagggtttttcttaaatattagcttttaatgtgtacaattaggaaatttttttaagtgaggactctctacccttgccgtatctaaggagctgaggtaatacagatccaaggagaattgtatagcaagaaaaaaaaaaaaaaaaaaaaaaaaaaaaaaaa

SEQ ID NO: 344 - DNA, 2196 bp, Homo sapiens
cggggtgtcttgggcccgggcggctgtagaggcggcggcgcctacgggcagtgggaggagccgcgcggttccggctgctccggcgaggcgacccttgggtcggcgctgcgggcaggtggcaggtaggtggcggacggccgcggttctccggcaagcgcaggcggcggagtcccccacggcgcccgaagcgcccccccgcacccccggcctccagcgttgaggcgggggagtgaggagatgccgacccagagggacagcagcaccatgtcccacacggtcgcaggcggcggcagcggggaccattcccaccaggtccgggtgaaagcctactaccgcggggatatcatgataacacattttgaaccttccatctcctttgagggcctttgcaatgaggttcgagacatgtgttcttttgacaacgaacagctcttcaccatgaaatggatagatgaggaaggagacccgtgtacagtatcatctcagttggagttagaagaagcctttagactttatgagctaaacaaggattctgaactcttgattcatgtgttcccttgtgtaccagaacgtcctgggatgccttgtccaggagaagataaatccatctaccgtagaggtgcacgccgctggagaaagctttattgtgccaatggccacactttccaagccaagcgtttcaacaggcgtgctcactgtgccatctgcacagaccgaatatggggacttggacgccaaggatataagtgcatcaactgcaaactcttggttcataagaagtgccataaactcgtcacaattgaatgtgggcggcattctttgccacaggaaccagtgatgcccatggatcagtcatccatgcattctgaccatgcacagacagtaattccatataatccttcaagtcatgagagtttggatcaagttggtgaagaaaaagaggcaatgaacaccagggaaagtggcaaagcttcatccagtctaggtcttcaggattttgatttgctccgggtaataggaagaggaagttatgccaaagtactgttggttcgattaaaaaaaacagatcgtatttatgcaatgaaagttgtgaaaaaagagcttgttaatgatgatgaggatattgattgggtacagacagagaagcatgtgtttgagcaggcatccaatcatcctttccttgttgggctgcattcttgctttcagacagaaagcagattgttctttgttatagagtatgtaaatggaggagacctaatgtttcatatgcagcgacaaagaaaacttcctgaagaacatgccagattttactctgcagaaatcagtctagcattaaattatcttcatgagcgagggataatttatagagatttgaaactggacaatgtattactggactctgaaggccacattaaactcactgactacggcatgtgtaaggaaggattacggccaggagatacaaccagcactttctgtggtactcctaattacattgctcctgaaattttaagaggagaagattatggtttcagtgttgactggtgggctcttggagtgctcatgtttgagatgatggcaggaaggtctccatttgatattgttgggagctccgataaccctgaccagaacacagaggattatctcttccaagttattttggaaaaacaaattcgcataccacgttctctgtctgtaaaagctgcaagtgttctgaagagttttcttaataaggaccctaaggaacgattgggttgtcatcctcaaacaggatttgctgatattcagggacacccgttcttccgaaatgttgattgggatatgatggagcaaaaacaggtggtacctccctttaaaccaaatatttctggggaatttggtttggacaactttgattctcagtttactaatgaacctgtccagctcactccagatgacgatgacattgtgaggaagattgatcagtctgaatttgaaggttttgagtatatcaatcctcttttgatgtctgcagaagaatgtgtctgatcctcatttttcaaccatgtattctactcatgttgccatttaatgcatggataaacttgctgcaagcctggatacaattaaccattttatatttgccacctacaaaaaaacacccaatatcttctcttgtagactatatgaatcaattattacatctcgacccggaat

SEQ ID NO: 345 - DNA, 932 bp, Homo sapiens
atgtctgctgaagtcatccatcaggttgaagaagcacttgatacagatgagaaggagatgctgctctttttgtgccgggatgttgctatagatgtggttccacctaatgtcagggaccttctggatattttacgggaaagaggtaagctgtctgtcggggacttggctgaactgctctacagagtgaggcgatttgacctgctcaaacgtatcttgaagatggacagaaaagctgtggagacccacctgctcaggaaccctcaccttgtttcggactatagagtgctgatggcagagattggtgaggatttggataaatctgatgtgtcctcattaattttcctcatgaaggattacatgggccgaggcaagataagcaaggagaagagtttcttggaccttgtggttgagttggagaaactaaatctggttgccccagatcaactggatttattagaaaaatgcctaaagaacatccacagaatagacctgaagacaaaaatccagaagtacaagcagtctgttcaaggagcagggacaagttacaggaatgttctccaagcagcaatccaaaagagtctcaaggatccttcaaataacttcaggctccataatgggagaagtaaagaacaaagacttaaggaacagcttggcgctcaacaagaaccagtgaagaaatccattcaggaatcagaagcttttttgcctcagagcatacctgaagagagatacaagatgaagagcaagcccctaggaatctgcctgataatcgattgcattggcaatgagacagaaaacgcccactcctggatcttcacattgaactcaatggctacatgtatgattggaacagcagagtttctgccaaggagaaatattatgtttggctgcagcacactctgagaaagaaacttatcctctcctacacataa

SEQ ID NO: 346 - DNA, 1582 bp, Homo sapiens
ggcacgaggcttccccggtgcagacacccggcgaagcccacccggttttcccagcggcatttccgatgacagcttcggggctacgtgtcctgtgctgtcggagacgcacaggaagcaaagtttgtgagaagccttgggggcgactttgccttgggcacccgcatttgtgcgtctgcgaggtgcctcggtgtgcgcggagctagtttcccagtttcccgggcccctcccttctccgagcccctctagcgatttgtttaggaaaagtgatgacatgaactagtagtggagaatcgcagcgccgctccccgccctggggagggaggggagccccggagagcctgccggtgggagctggaagcaggctcccggctgagcgccccagcccgaaaggcagggtctgggtgcgggaagagggctcggagctgccttcctgctgccttggggccgcccagatgagggaacagcccgatttgcctggttctgattctccaggctgtcgtggttgtggaatgcaaacgccagcacataatggaaacaggacctgaagacccttccagcatgccagaggaaagttcccccaggcggaccccgcagagcattccctaccaggacctccctcacctggtcaatgcagacggacagtacctcttctgcaggtactggaaacccacaggcacacccaaggccctcatctttgtgtcccatggagccggagagcacagtggccgctatgaagagctggctcggatgctgatggggctggacctgctggtgttcgcccacgaccatgttggccacggacagagcgaaggggagaggatggtagtgtctgacttccacgttttcgtcagggatgtgttgcagcatgtggattccatgcagaaagactaccctgggcttcctgtcttccttctgggccactccatgggaggcgccatcgccatcctcacggccgcagagaggccgggccacttcgccggcatggtactcatttcgcctctggttcttgccaatcctgaatctgcaacaactttcaaggtccttgctgcgaaagtgctcaaccttgtgctgccaaacttgtccctcgggcccatcgactccagcgtgctctctcggaataagacagaggtcgacatttataactcagaccccctgatctgccgggcagggctgaaggtgtgcttcggcatccaactgctgaatgccgtctcacgggtggagcgcgccctccccaagctgactgtgcccttcctgctgctccagggctctgccgatcgcctatgtgacagcaaaggggcctacctgctcatggagttagccaagagccaggacaagactctcaagatttatgaaggtgcctaccatgttctccacaaggagcttcctgaagtcaccaactccgtcttccatgaaataaacatgtgggtctctcaaaggacagccacggcaggaactgcgtccccaccctgaatgcattggccggtgcccggctcatggtctgggggatgcaggcaggggaagggcagagatggcttctcagatatggcttgcaaaaaaaaaaaaaaaaaaaaaaaaaaaaaaa

SEQ ID NO: 347 - DNA, 1543 bp, Homo sapiens
  modified_base (52)..(55): a, c, g, or t
  modified_base (107)..(107): a, c, g, or t
  modified_base (738)..(738): a, c, g, or t
  modified_base (1093)..(1093): a, c, g, or t
  modified_base (1121)..(1122): a, c, g, or t
  modified_base (1360)..(1360): a, c, g, or t
  modified_base (1518)..(1519): a, c, g, or t
ggacgtggggcggtgcgcggggctgggcggcggctgaggcgcgtgctctcgnnnngtcgctgggtctgcgtcttcccgagccagtgtgctgagctctccgcgtcgcnctctgtcgcccgcgcctggcctaccgcggcactcccggctgcacgctctgcttggcctcgccatgccggtggacctcagcaagtggtccgggcccttgagcctgcaagaagtggacgagcagccgcagcacccgctgcatgtcacctacgccggggcggcggtggacgagctgggcaaagtgctgacgcccacccaggttaagaatagacccaccagcatttcgtgggatggtcttgattcagggaagctctacaccttggtcctgacagacccggatgctcccagcaggaaggatcccaaatacagagaatggcatcatttcctggtggtcaacatgaagggcaatgacatcagcagtggcacagtcctctccgattatgtgggctcggggcctcccaagggcacaggcctccaccgctatgtctggctggtttacgagcaggacaggccgctaaagtgtgacgagcccatcctcagcaaccgatctggagaccaccgtggcaaattcaaggtggcgtccttccgtaaaaagtatgagctcagggccccggtggctggcacgtgttaccaggccgagtgggatgactatgtgcccaaactgtacgagcagctgtctgggaagtagggggnttagcttggggacctgaactgtcctggaggccccaagccatgttccccagttcagtgttgcatgtataatagatttctcctcttcctgccccccttggcatgggtgagacctgaccagtcagatggtagttgagggtgacttttcctgctgcctggcctttataattttactcactcactctgatttatgttttgatcaaatttgaacttcattttggggggtattttggtactgtgatggggtcatcaaattattaatctgaaaatagcaacccagaatgtaaaaaagaaaaaactggggggaaaaagaccaggtctacagtgatagagcaaagcatcaaagaatctttaaggnaggtttaaaaaaaaaaaaaaaaaaaaanngattggttgcctctgcctttgtgatcctgagtccagaatggtacacaatgtgattttatggtgatgtcactcacctagacaaccagaggctggcattgaggctaacctccaacacagtgcatctcagatgcctcagtaggcatcagtatgtcactctggtccctttaaagagcaatcctggaagaagcaggagggagggtggctttgctgttgttgggacatggcaatctagaccggnagcagcgctcgctgacagcttgggaggaaacctgagatctgtgttttttaaattgatcgttcttcatgggggtaagaaaagctggtctggagttgctgaatgttgcattaattgtgctgtttgcttgtagttgaataaaaatagaaacctgaatgaannaaaaaaaaaaaaaaaaaaaaaaaa

SEQ ID NO: 348 - DNA, 3067 bp, Homo sapiens
  modified_base (22)..(28): a, c, g, or t
  modified_base (696)..(697): a, c, g, or t
  modified_base (699)..(701): a, c, g, or t
  modified_base (2920)..(2920): a, c, g, or t
  modified_base (2925)..(2926): a, c, g, or t
ttttttttttttttttttttannnnnnnttctgtgaataggtttattaagaccacctaggagaacctctttggcaactaccacaaattctaggccatttaaaatccaggccaagttcatatttgctctccatgatcaccattacaacaaccacaggtcacacagtattacagaacaaaagcatggtcactttattttacccaaatgcaaatcgtttttcacaaccaagacttttttctttcctacaatgttacaaatgatgtatccaagtccgactgtaatttggagttaaacagggatcatagaaccaaggaattatctctgaagctgctctttgggccactgtgccaccccaacagctctatcctgttgttcttttttttaattaaaaaatcattaaaaaaaaaatggagatggggtcttgctatactgcccaggctgatcttgaactcttgggctcagacgtaccgatatactgatcctcccgcctcagccttccaaagtgttgggattacaagtgtgagccattgcactcagccatctctacacactgtttttcaaggaaaggcagctacacctattccgtctccaaaccaaccctcacctggtgtccagttttcttggaagtctcaatttttctcatgacagcacattacctaatacctaccacattaggatgttaactcataaaaacatnntnnnaaagctttaaaaaacatttatttgtattaagtaagtgcaacagtgcaaagaaacttatgcatttgggcccttgcttccctactgttcacattagtttagtttagaagattaagtataataacagaaggagaacagaagaaatgaatataaatatactcagggtagccaaatcctctaattcactaaaggatgaaccaaagttgttggccagattcacatttatgtgggagcctaaacaaattatgttccctttaactgttctaggcctgtggaaaagggaagtggacaacatttatattacaagacagtaattttattgaaacatctttttttgtctaaaactatgcatggagatattaatctcttgtttataaattaggttaagtctaacatcactatttgaaaccagtgttatttacaaaaatgaacctcttctttgctttattgttggtttacaggaataattttaaaccaacctcaatctatctttaaaaatcttcctgccttcaaatgcccagcaacccttataaggtagggggcagccctttgacagcaacattcatcattcaccaggaatgtagaaccacaagtgaacaacaacaacaacaacaacaagattaaatcattcccaacaattcctatttgcttttccaaagcatgctatgtctaattctgcctttctatgcagacaggtgggagagggagcccatagagtatattaatgttaattaaattaacttcctttaaaagctaacaggatggcttagtgtggatgaggatgaactgctgtggatgacactagcagataatgaagtaaactttaaacccagattagtaacatgtactccagtaactgaccagctcagatagagacttctcatttactctggatcacatgtacaatattttaccttccaattaaatatagtgccaaaatctttcaaaatagatagagaataggcttcttagaaattcaaataaaaatgttaaataataaaaactggtggcctattatagagtttctgacagactccaatatactgggtaccagaaagtaactctatctcagatgctagtaaaaaggtaaattttgtatatacataaaagacaatattacgagactgtagtgtcatttgtcaaaacaagaatatctagaatggaattttcagtaaacacttgggatgaagggcaatcagaatacaagaggaagcaaaatccacataagttaattcctaatttgagaaatcaatagaatcaataaattgataattactgtctccataggtcacgaattccaaagactagttagtagttagtttctaactaaatgattacaggacgttctgatatatgctgtcttcttgtgatcagtttgttctggcaagacttcaacaagcacttgcccttgaaaacagctcagcgggagaacgatcggaggcaatcacttcgttttataaactagccagataataagtcccaagattagaataatcactgacaggacaagcaccaggatacacatcttcttgcgagattttttctgatagtaagcagctcgctgtaactgttcagtggctctttcgacgtgcacctctgagctttccacattggcttctatgctatcaatcagatcaccctggtcatggatcatcatggccaaatctttaaatatctgattgacatccaaaatgtcagcctccagctgccgaattgccgtttctctttctttaataagttccaaatcctgctcagtgatggccacctcatcctcctggctctgcatctggttccactcctcatggctgtcaaatgagaccagctgctcctctctttgcctctcttctgcagaaagacgagatccagctcttgctctggcaatactctccttttccttttcagatacccttctctgcacagcctggaaattgtttaaggctgcagagaagtcattcatgaggcgttccttctgaagtctctgctggcgctgttctgaagtagataagggaaggggcaaggaccctaattctttcagcaattcatttgtttccttggcgagctgatttgtggagtgttgtaactgttgcagattttcctgtagcttgcttgagtcctgcttagttcctagctggctcatcaaattctttatctgagcagtggcttggctgatccgctggatgttgccgctgcacgtctggatgatgctgctgaagtcccggagnctggnnccccgagggccccgggttccggtacatgtctaagggaccgtatgacatgacgaggagctgagacctgctcgctctacaccgctctcctaccggaagcagccgccagccgggacccgcaggctgacggagaaactgggaaga

SEQ ID NO: 349 - DNA, 5649 bp, Homo sapiens
  modified_base (58)..(58): a, c, g, or t
  modified_base (60)..(61): a, c, g, or t
  modified_base (63)..(63): a, c, g, or t
  modified_base (66)..(68): a, c, g, or t
  modified_base (141)..(141): a, c, g, or t
  modified_base (143)..(143): a, c, g, or t
  modified_base (172)..(172): a, c, g, or t
  modified_base (184)..(184): a, c, g, or t
  modified_base (219)..(219): a, c, g, or t
  modified_base (229)..(230): a, c, g, or t
  modified_base (282)..(282): a, c, g, or t
  modified_base (371)..(371): a, c, g, or t
  modified_base (402)..(402): a, c, g, or t
  modified_base (410)..(410): a, c, g, or t
  modified_base (414)..(424): a, c, g, or t
  modified_base (426)..(426): a, c, g, or t
  modified_base (463)..(463): a, c, g, or t
  modified_base (471)..(471): a, c, g, or t
  modified_base (480)..(480): a, c, g, or t
  modified_base (488)..(488): a, c, g, or t
  modified_base (545)..(545): a, c, g, or t
  modified_base (589)..(589): a, c, g, or t
  modified_base (594)..(594): a, c, g, or t
  modified_base (852)..(853): a, c, g, or t
  modified_base (858)..(858): a, c, g, or t
  modified_base (860)..(866): a, c, g, or t
  modified_base (868)..(870): a, c, g, or t
  modified_base (953)..(955): a, c, g, or t
  modified_base (957)..(957): a, c, g, or t
  modified_base (1163)..(1163): a, c, g, or t
  modified_base (1259)..(1259): a, c, g, or t
  modified_base (1288)..(1288): a, c, g, or t
  modified_base (1511)..(1511): a, c, g, or t
  modified_base (1559)..(1561): a, c, g, or t
  modified_base (1587)..(1588): a, c, g, or t
  modified_base (2080)..(2084): a, c, g, or t
  modified_base (2087)..(2089): a, c, g, or t
  modified_base (2101)..(2101): a, c, g, or t
  modified_base (2285)..(2285): a, c, g, or t
  modified_base (2567)..(2567): a, c, g, or t
  modified_base (2569)..(2570): a, c, g, or t
  modified_base (2713)..(2715): a, c, g, or t
  modified_base (3059)..(3059): a, c, g, or t
  modified_base (3061)..(3061): a, c, g, or t
  modified_base (3949)..(3951): a, c, g, or t
  modified_base (3953)..(3953): a, c, g, or t
  modified_base (3970)..(3974): a, c, g, or t
  modified_base (3977)..(3979): a, c, g, or t
  modified_base (4140)..(4140): a, c, g, or t
  modified_base (4393)..(4393): a, c, g, or t
  modified_base (4423)..(4424): a, c, g, or t
  modified_base (4430)..(4430): a, c, g, or t
  modified_base (4505)..(4505): a, c, g, or t
  modified_base (4512)..(4519): a, c, g, or t
  modified_base (4521)..(4521): a, c, g, or t
  modified_base (4523)..(4524): a, c, g, or t
  modified_base (4526)..(4527): a, c, g, or t
  modified_base (4530)..(4530): a, c, g, or t
  modified_base (4532)..(4533): a, c, g, or t
  modified_base (4535)..(4535): a, c, g, or t
  modified_base (4629)..(4629): a, c, g, or t
  modified_base (4796)..(4796): a, c, g, or t
  modified_base (5498)..(5498): a, c, g, or t
  modified_base (5523)..(5531): a, c, g, or t
gtcgactcggtcatgtgtctcatgtatgaagccactcccatcccagaggctaagctgncnncngtnnncgtgaggaaggagcggaagcgacacaaaacagacccctcagctgcaggcaggaagaagaagcagcgtcacggngnaggcggtcgtccctcctcggtccctgttntgaccgcgcaancaccaggacttctgaaaattcgcagagagggcaangagcagaagnngaatattctgctgaagcagcaggtgccattcgccaagcccctgccaactttngccaaacccacagctgagcctggtcaagacaaccccgagtggctcatcagtgaggactgggcgctgctgcaggctgtaaagcagttacnggagctgcctttgaacctcacaatcgtgtcnacctgctncacnnnnnnnnnnngngatcttgtcagtgacgttgttaactcctgtagccgantctaccgntcttccaanacagtgcnggaatcgctacgagaatgtcatcattccacgagaggaggggaagagtaaaaacaacngtcctctccgtacgagccagatctatgcccaggatgagaatgcnacacncacccagctgtacacgagccactttgacttaatgaaaatgactgctggcaagaggagtcccccaatcaaacctctgcttggcatgaatccctttcagaagaaccccaagcacgcgtctgtgttggcagaaagtggaatcaactatgacaagccgctgcctcccatccaggtggcatctctccgtgcagagcgaatcgcaaaagagaaaaaggctctggctgatcagcagaaggcacagcagccggccgtggcccagcnnccccngnnnnnnncnnngcccccaccacccccgcagcagccaccgccaccgctgccacaaccacaggcagcgggcagccagccgccagcagggccaccannngnccagccccaaccccagccacagccccagacccagccacagcctgtgcaggccccagcgaaggcgcagcccgcaatcacgacggggggcagtgcagccgtactggcaggaaccattaaaacatcagttactgggacgagcatgcccactggtgccgtgagtggaaatgtgatcgtgaacaccatcgcaggggtcccagctgccaccnttccagtccatcaacaagcgcctggcgtcgccagtggctcctggggccttgactacgccgggaggctctgctcccgcccaggtggtgcacacccancccccgccacgggcagtcggctccccagncacggcgacccctgacctggtgtccatggcaacgactcagggtgttcgagcggtcacttctgtgacagcctcggccgtggtcactaccaacctgaccccagtgcagaccccggcacggtctttggtgccccaagtgtcccaagccacaggagttcagctccctggaaaaaccatcacacctgcacatttccagcttctcaggcagcagcagcagcagcagcancaacagcagcagcagcagcagcagcagcagcagcagcagcagcagcannnacagcagcagcagcaacagacgacgnngacctctcaggtgcaagttccacagatccagggccaggcccagtccccagcacagatcaaagctgtgggcaagctgacgccggaacacctcatcaaaatgcagaagcagaaactgcagatgcccccgcagcccccaccgccacaggcccagtctgcgcccccgcagccagcagcccaagtgcaagtgcagacctcgcagccgccgcagcagcagagcccccagctcacgacggtcacggccccaaggcctggtgccctgctgacgggcaccaccgtggccaacctccaggtggcccggctcacccgggttcccacttctcaactgcagtcgcaagggcagatgcagacccaggcaccccagccagcccaggtgcccttgccgaagcctccggtggtgtccgtcccggcagctgtggtctcctcaccgggagtcaccaccctgcccatgaacgtcgcggggatcagcgtggcgatcggtcagccacagaaggnnnnnggnnngaccgtggtggncccagcccgtgcacatgcagcagctgctgaagctgaagcagcaggccgtccagcagcagaaggccatccagccccaggctgcacagggcccggcagccgtccagcagaagatcaccgcacagcagatcaccacccctggcgcgcagcagaaggttgcctacgccgcgcagccggcccttaagancccagtttcttaccacacccatctcccaggcccagaaactggccggggcccagcaagtgcagacccagatccaggttgcaaaacttcctcaagttgttcaacagcaaacacccgtggccagcatccagcaagttgcctctgcttcccagcaggcttctccacagactgtggcgctcacgcaggcgacggcggccgggcagcaggtgcagatgatccctgcagtgaccgcgactgcccaggtggttcagcagaaactcattcagcagcaggtggtgaccacgncnncggccccgctccagactccaggcgctcccaacccagcccaggtgcccgccagctccgacagcccaagccagcagcccaagttacagatgagggtccctgctgtcaggctaaagacacctactaagcctccgtgccagtagtcnnngcagcagggctgcctctcatctaaagcaaaactaccttcctcacagaaaacgctttattagtgaaccttgggaccatgtcacgcaagagattcagcactgggaaagatataattgaaacaaaatagtgtaatcattttattaaaatgcatcccacactgcaggacaaatggtccttatggagtgccgcgttctctgtactacgtggctcatggaaaaagtgacaacatggcttcctctaaatcatttcacctttcagtccccacccgcacccgtcccctagagccatagtactgtgttctgaaagccatttagaatttctttgtgagcatgtagtgctttgcancnccacagaagccgtctgccgtgtgtgaggagcatacaatggactttctaaagataaggcgtgggcttccacagtgtctgccagagtttagttctttataccttactgaaaaatgcctcgtggtcttcgcagaggggaaggcctgtctaaagtcaatcatccgagatgggttttccattccaaagaaaggcaatatggttccttccttccctcctaaaatatgacttaacttttaagagaaatgttctgacacccacctaaacacacaaggcacgttcctggcctgtgttcaagggaaatgatcagtcattgcattgttattccaaagagcagccaacagtggcctcccccaggccctaccctgcaatgggattcgctttcatttaatggaaacttctgggactgatgcccaactcagtgcactcaagacgcatctccagttttcgggggaagctggtatttgacatagtgtgttaaacagctcctgagaacctttgggacactctgccatggctggcgtgaggcccagaggaccacgcagaggcaatggtagtacagatgtcacagctgagggtacgatgaggcctgggctcagtgagccaggacgaatgtgacagacaccccttgctgccacagtcagccctttgacgaaggtgggctggtgattctggaagtattggctatagcggtgggcccagtcaactcttccttgtggacttacgacagcagattttctctaggataagcttgtgtggttctgccagtgaagcagagaaccacctgtgctgttgtggaaggcgtgccgttgagggggaaaacgaagcccagtatttgctactgtttttcctttttttactatgacaggaaaataaatgcaattttagtggaannnanaaaaaaaaaaaaaaaannnnnaannnttcaccaaagcaaaaaggtccatatccaatagtatcctttgtgctgtggcttgattttggcctattttacattatttggtccaggaaattaggttatattaggttttttgtatactaaaaatcagttatggcacaataaagattttctgtttttaaattgnatttcatctgcttcctccccattctctcactttaagtgacattgaggaaggtattctgtcccacaggtttctgtggacagcgatacagcaggagtcagtgaaatcaactggggagctcacttgagctcttgataagaaatgtggagaaaagtaaaaaccaagctttgaagaaacagaagaaattaatcttttagttagttgaacataccaaagcagaggactggaatctgtttgttctaaccaacccgttctncctggcttggcacgtgccgtgagagcgcannttgccnggagggagggccgctgtgtgcgcctcacatctggctcccagtggaaacttttactcctcctcatccgcagatgtnatagaannnnnnnntntnngnnttntnncnttgtcatttgttttaatttgtgtgccctgttcattttttttgtctttcccaaatcttggtagtctccttatagttgaagataaaatgttgagtncacttattttagaatatcctagacataactgtctaagtaaaagcgctctattaatctaaaacactacaagagaatttaacaccatctctcaaatgcttttttggagagcttaatgggattctgaatatttgcaatgtggagtttccgccccgatctcacgtcagtgngggtctcctgtctctcaagtgtgtttcctttggctgttccctaatacaaaacacggacatatttttactcgtagcactcaatttagtaacttctagatgctaccgttgacctgagttaaattcatttagtcgtgtacgtaaaaactctccttttagtgtgttattttcttggccttcccttttaaaggttaaagtttctaacctaagaattaagtacgcgttcaggaagctgttgtctaggccttccccttgtgaatctgggttcattccaatacggcaagtaagagttggaaactttgagaacacagactataaaggcagcagcccgaacactgtcagactctaattggcgaccctgggaaacagttgccctgctattctttaaagaaagacgtttattctgatgataaaaacagttagccagactgtttttaaagcacctggcgggaagcagaaggttggatccaagcccttgttcagatttggtgcctgataagacaggggtttctctttttgtgacctttattattattattttgttaactgttgtaaccagttagctgttgtgttttaagatagaaaggaacaagactaaaattgtaaatactttgtaaacatcagcatttgtacttgaatagtaggattttaaagggcattgatagcataccaaacaaaaggcaaaataaagtgacctttttatanaaaaaaaaaaaaaaaaaaaaaaaannnnnnnnncggtccccaattccccctatagtgagtcgtattacaattaactgggccggcgttttttacaaccgttcgtgacttgggaaaaaacccctggggggttaccccaaacctttaaattcgc

SEQ ID NO: 350 - DNA, 5658 bp, Homo sapiens
  modified_base (120)..(120): a, c, g, or t
  modified_base (179)..(179): a, c, g, or t
  modified_base (666)..(666): a, c, g, or t
  modified_base (723)..(723): a, c, g, or t
  modified_base (1451)..(1451): a, c, g, or t
  modified_base (1453)..(1470): a, c, g, or t
  modified_base (1472)..(1475): a, c, g, or t
  modified_base (1477)..(1477): a, c, g, or t
  modified_base (1479)..(1480): a, c, g, or t
  modified_base (1482)..(1482): a, c, g, or t
  modified_base (1485)..(1485): a, c, g, or t
  modified_base (1487)..(1487): a, c, g, or t
  modified_base (1489)..(1489): a, c, g, or t
  modified_base (1491)..(1491): a, c, g, or t
  modified_base (1493)..(1497): a, c, g, or t
  modified_base (1499)..(1500): a, c, g, or t
  modified_base (2361)..(2361): a, c, g, or t
  modified_base (2638)..(2638): a, c, g, or t
  modified_base (2680)..(2680): a, c, g, or t
  modified_base (2685)..(2685): a, c, g, or t
  modified_base (2696)..(2696): a, c, g, or t
  modified_base (2708)..(2708): a, c, g, or t
  modified_base (2710)..(2710): a, c, g, or t
  modified_base (2726)..(2726): a, c, g, or t
  modified_base (3083)..(3084): a, c, g, or t
  modified_base (3549)..(3550): a, c, g, or t
  modified_base (4425)..(4425): a, c, g, or t
  modified_base (4929)..(4931): a, c, g, or t
  modified_base (5033)..(5033): a, c, g, or t
  modified_base (5118)..(5118): a, c, g, or t
  modified_base (5643)..(5644): a, c, g, or t
  modified_base (5646)..(5648): a, c, g, or t
cgagacgctgaagagaaccagggctaccagaagcagcaacagcagcgagagtatcgcttccgccatttccatgaaaatttttattttgatgaatccttttttcacttcccttttaattcntgaacggcgggactcaattgacgaaaagtatttattgcacttttcacattatgtgaatnaagtggttccagatagcttcaagaaaccctacctcatcaagatcacctccgattggtgctttagctgcattcatatcgagcctgtgtggaaagaagtcattcaagaactggaagaattgggtgtaggaattggcgtggtccatgctgggtatgagagacgcctggcccatcacctaggggcacacagcacgccctctatcctaggaatcattaacgggaaaatctccttcttccacaatgcagttgtccgtgaaaatctgcgacaatttgtagaaagtcttcttccagggaacttggtggagaaagttacaaataaaaattacgtcagattcctctctggctggcagcaagagaataagcctcatgtccttctgtttgaccaaacgcccattgtgccactgttatacaagttgactgcctttgcatacaaagattatttatcatttggatatgtatatgtgggtttgagagggacggaagagatganaaggcggtacaacatcaatatctacgcccctaccctcttggtctttaaagaacatanaaacaggcctgccgatgttatccaggcccgaggtatgaagaagcaaatcattgacgacttcatcacccgaaacaaatatctattggcagccaggctcaccagccagaagttgttccatgaactctgccctgtgaaacggtcgcatcgacagaggaagtactgtgtggttttattgactgctgagactaccaagttgagcaaaccctttgaggctttcctgtcctttgccctggcaaacactcaagacacagtgagatttgtgcatgtctacagcaatcggcagcaggagtttgccgacaccttactaccagacagtgaggcgtttcaagggaaatcagcggtgtctattttagaaaggcgcaacacagcaggaagggtggtgtataaaaccctggaagacccttggattgggagtgagagtgacaaatttatcctcttgggctatctcgaccagctgcgtaaagatccagctcttctgtcctctgaagcagtgcttcctgacctgaccgatgaacttgcccctgtttttctccttcgatggttctactctgcttctgactacatctcagactgctgggatagcatttttcacaacaactggagggaaatgatgcccctgctgtccctgatcttctctgccctcttcatcctcttcggcactgtcatcgttcaggctttcagcgactctaatgatgagcgagagtcaagccctccagaaaaagaggaancnnnnnnnnnnnnnnnnnnannnnancnnanctncncnanannnnncnncagcaagattcctaaaaaaggctttgtggaggtaactgaactcacagatgtaacatacaccagtaacttggtacgtctgaggccaggccacatgaatgtggtcctcatcctgtcgaattctaccaagaccagcctactacagaaatttgctttggaggtctacacatttactgggagcagctgcctacacttctccttcctgagtctagataaacacagagaatggctagaatacttactagaatttgctcaagatgcagctccaatcccaaaccaatatgataagcatttcatggagcgtgactacactggttatgtactggctctgaatggccacaagaaatacttctgcctcttcaagccccaaaagacagtcgaagaggaggaagccatagggtcgtgcagtgatgttgactcttccctctacctgggtgaatctcgagggaaaccttcctgtggccttggatccaggcccatcaaaggaaagttgagcaagctctctttatggatggaacgcctgctggagggctccttacagaggttttatatcccatcatggcctgaactagactgagaggattttccaaagagatttgaactcttcagactttttaacatgcccctgtgaacaggtattttcaggactcaaactaccacaatgaacagagtatagattttagattgctcttctagaaccatggctagaagaatctttcctttgtcctgttctaacctaggaatgaaaaacaccaccagtttgaatcgcctagatgaaaatcttttcctctgggtgttatttttccccactgaatgccacaccattgaaaatagactgctcatcccctcttcctttcttgtccntgtcccatgctcaccccaccctcctgtcctgtgtcttggagaagcacagggctccaccctgcaagcggcatctggcggaccctcatgagcctgtcgtgcaggccaggtcattggccccttccccaatcccggccctgctgtgctgctgccatggcgcatgctcctaactctgaacaacccacggcagcttctagccccgcatctggaaaaaggcccctttccaagcaatctcacgtttactggttgttctgggagtaagtggctaaatgtatatttngggggtatcccccaacaacagtttgttggccacaggttgaanagganaggaataaacnggagttctgcangngagttctcaagaaaanggaaagggaggctgagcagtggctgaagcgatgcagccttgagacacgctgtgagcatcccatccgccgccccagcgctgctggtagccaggggaggggtctgcacagcgagaagtactgtgatgactttgagccgttgacatgtatgtcttcagatgcctttctgcctctgtcgattttagggtatggatattaggagccataacttgtaatcttgttctctgaacgtagagataagctgctataaagccagtagatgttaaactgaagagaaattattcccacctgctatgagtcaggcttaaggaatctcttcaatagtgtctctttagtaaaataccaaacatgtctttgtannaaggaacttaaaatttctcaacaattgtattttgaacactgttaccctaaaagtgctgtctcttcaagtcatcttttgcaggaagtgagccaagatttgttctagactcccattttgcaaaaggcttactttccacttctgggctgtattttgatgtctcatcttcattgttttcactcttaacttagagctgcttcaccagtattggggtcagactggccatcagcacctgagcgtgctgagctccaggtatagtggaccccagggtgcctcataccagccagttagagagcataccttttatttttcagggcagaatgaccagtggttctgagtttgagtttggacagcttcaaagagtggtccgttcaaatgtcaaagcaaggtgcctttggtggctttgtgaagggtgaaaatcagtgatgggacatttactaagtatttctttttttttttttttttttnnagttgttgagacagagtttcactcttgttgcccaggctggagtgaaatggtgcgatctcggttcaccgcaacctccacatcccaggttcaagtgattctcctgcctcagcctcctgagtagctaggattacaggcatgtgccaccatgtaattagcccggctaattttgtatttttagtagagacgggatttctccatgttgatcaggctggtcatgaactcctgacctcaggtgatctgcctgcctcagcctcccaaagtgctgctgggattacaggcgtgagccaccactcccggctaagttagtatttctttaatcttaatgctttaaactaagccacttggatcctgaataatttaaatcttgagctacattggtaagtaataaattatttaaggccaggaattcctgtagttttcatggagtctgtagctttattaaaaaataaatcactgccaggcttcattcttccatatgatcctctaaaaatggacacttcctctgaatgctgtatctcatggcacctggtccaactagaaatggtcaaggaattcatttggctccttgatacatcagtcctcaatattactttctaggtattttatggccagattgcttatatgagtggtcttttggtttggtagtaggtttttatttttaatttctgtactaatgaaattcctgactttaatttctgaaaaccaaaaactctccaagtgtatttatttatattttttttaatagagacgaggtcttgctatgttgcccaggctggtcccaaactcctggcctcaagcagtccttccaccttggcctcccaaagtgctgggattatcaatatgagccaccatgccagatttgttcatttttaaanatttttatctcttcaagtcatcttttgatcttttaaaaagcaccttcaaacagctgcaccttccatttgcactaggaaatgaaggtagtgatgggattggcaatgttcctggcagatgtttcagcccaaaagctcttctacagaccggtttagagctggtgccctatgagaatattagggagcttttattttaaattgaactttacccttgtccatgcaaggcattcctcctgaatgcatccatgaatttgtttacttttgcgtcaaacatatgagccattgtcatgctcagcctgtgccaccattgctctgtctgatgtatgtaatcatacaagacctgattttggttctaacacagtggtctttgactatcaacattgatgtttttagagatgggttcttctggttgatacagactatgcattgcgtttagcagatggggtaaaactggcctaaaacaagtctttgcagaatacatgccaatttccaaaaaaaaaaaaaaannntttgttgctcaggtgttgcacaatttttatctaacactgaggctatcagctccaactaaacaacatttcagtgggtgaggctgccctaacttccattagggnccatggtctcactgccatcacttattagccatgagaatttggttgtagttttcaggtaggttggtttcttcctcatttgcagctngttgatacttgttcctttttatttattaacatcccaatcaatttgcagctgccatcattacataaatatttttctgttataaaaagaagtgtgatctgtttttttagtgatttcctttgtttgggaatagagattggaagcacatactcagacctgttttgttaactagaattctttaaaagctgatgccaaacatctttacagaggaactgtagttcacatccacctgtctgacattgtcccctaaaaacaagtgcagtgtggcagctgctgaatctgtctgttcagtttgtcaaggaggataattatgcttgggagagatctgaaaagaaggtgaatattttgcacttttgatactcttaggaacaaataacttatttggcaaattgtttcttttttatgttttgggtgttgtttttgttttttgactttttttgtattgtgaacaggcactgaagctgatgttattttaagattacagaatggaaaaagaaataaactattttaatgtctgataaaaaaaannannnaaaaaaaaaa

SEQ ID NO: 351 - DNA, 3761 bp, Homo sapiens
  modified_base (708)..(708): a, c, g, or t
  modified_base (712)..(712): a, c, g, or t
  modified_base (720)..(720): a, c, g, or t
  modified_base (1887)..(1887): a, c, g, or t
  modified_base (1889)..(1891): a, c, g, or t
  modified_base (1893)..(1896): a, c, g, or t
  modified_base (1900)..(1903): a, c, g, or t
  modified_base (1905)..(1913): a, c, g, or t
  modified_base (1979)..(1979): a, c, g, or t
  modified_base (2048)..(2048): a, c, g, or t
  modified_base (2109)..(2109): a, c, g, or t
  modified_base (2160)..(2160): a, c, g, or t
  modified_base (2291)..(2291): a, c, g, or t
  modified_base (2294)..(2294): a, c, g, or t
  modified_base (2337)..(2337): a, c, g, or t
  modified_base (2388)..(2388): a, c, g, or t
gcacgagggatagcttttacatcatagagtctggcgaagtgagcatcttgattagaagcaggactaaatcaaacaaggatggtgggaaccaggaggtcgagattgcccgctgccataaggggcagtacttggagagcttgccctggtcaccaacaaacccagagctgcctcagcttatgcagttggagatgtcaaatgcttagttatggatgtacaagcattcgagaggcttctggggccctgcatggacatcatgaagaggaacatctcacactatgaggaacagctggtgaagatgttggctccagcgtggatctgggcaacctcgggcagtaggtgtgccacaccccagagccttcttagtgtgacaccaaaaccttctggtcagccacagaacacatacagaaaacagacatgacagaactgttcctgccgttgccgccactgctgccattgctgtggttatgggcatttagaaaacttgaaagtcagcactaaaggatgggcagaggttcaacccacacctccactttgcttctgaaggcccattcattagaccacttgtaaagattactccaacccagtttttatatcttgggttcaaaacggcatgtctctccaacaatttaagtgcctgatacaaagtccaaagtataaacatggcttcccctttttttcccctttctttccttttggcctgtgccgtanctcntgtgcttntggaagttaccacagggtctgcagaaacctgttgtataactgtagacactctctaatggttctcaaaggaggaaatgtagccttcagtctcctcatttgtcctttgaggaagtccacatttgttcacagttgcaacctttggttttacagtgggaaatggtggtggatgatatggacatatgtagcccagtggcattgtacttctgctgacagctgcacacattacagctgtctccaaacccacagtgatgcttagggaaagaccctgctcaggacccagcaggtcagcaccccagagcagactgataggtccgtgggacccatgttagagcagaaaatttgggctcagcacattttactgttagtagagagccaggaaacgttttctgggttggggattttgtgggattttttaatttttttagtaggttttgtttaacctctgtgcagtttgtatgaatgaattgctatacatttataaggagccagggtctggagggttgctatcactttgtccagcccaaataccttcctgggcaactcctaccatttgtttgcagttgcctctactagctgatggcagtatgctggaaagaggttgtactataaagagagttctttccttctactccagagttgttgtgtagctttgccattgaaccgatcaatttttaaactctttaaagaagcagcagctatttttttgaaattaaagaaaattctcaggccaggctcaatggctcatgcctataattgtagtgctttgggaggctgagctgggaggatcgcttaagaccagcctaggcaacagagtgagatcctgtctctacaaaaacaaaaattttttttttgttttctttttgagacggagtttcgctcttgttgcccaggctggagtgcagtggtgcggtcttggctcaccgcaacctccgcctcccagattaaagtgattctcctgcctcagcctcctgagtagctgggattacaggcatgcgccaccatgccgggcgaattttgtatttttaatagagacagggtttctctgtgttggtcaggctggtctcaaactcccaacctcaggtgatccgcccacctcagcctctcagagtgctgggattacagatgtgagccactgcacctggcaaaaaaaaattttttttttaattngnnngnnnnggtnnnncnnnnnnnnngtcccaaatacttaggaggctgaggtggaaggatcacttgagcccaggaggtcaaggcaacagtgngctgtgatcatgccactgcactccagtctgggtgacacagtgagaccctgtctcttaaaaaaaaaaaangaaagaaaaaaaattattctttaggtaatttcacttggacatattcatgtatatggagttngtcagctgactcaggcatttaccctaaagatcaaatctgttttcaaaaatnggcattggccaggcacggtgacccacacctgtaatcccagcactttgggaggccgaggcgggcggatcacgaggtcaggggttcaagaccagcctggccaacatagtgaaaccccgtctctactaaaaatncanaaaattagctgggcatggtggtgggcgcctgtaatcccagctncttgagaggctcaggcaggagaatcgcttgaacctgggagtggaggttgcngtgagccgagattgcaccattgtattccaccccgggtgacagtgcaagactccatctcaaaaaaaaaaaaaaaatttggcatcatttacaatttcatagaattactgtgaaggcctttctagttgagatgttggggtatttgggattctaattgttaaccccagaagaaggtaatttagcttgtatttatttaaaacccatttagccttttacttatatctggtagaattccagtgatcatcctaataaggtatatttcagaataatttttttttccttcagaataacttagaatcagatgctataagggctcctaggagcagtgtgaaatttccgtaaagataaatttgaatgttgtaaccaagtttatattaaaccaagaggccatttccaatatgattttttgtttctttttaacttgttaagtccctaagagattacatgctagggcttgagtcatttctattgtagataatgatggcccacacagtcaccttcaactatccacataagctaggctttccgcttttgccacggacagtgtgaccaagatatttccagagtaaataacccaccacaaccttggtaattcctcttttcttcttaagctccaggaagcgaaagcagaaggactcttttcagactgccctctgtagcctacattgcagctttccaaaacaggcagctagcactgggaaagcccatgtggtgaccccatatttttctgaggttcttcttttccatggtgttactttattatcagaaagtaaattcagaaaacaggtcttgcccttagcagacaagaaccacaccagtttcttgtaaaggtaacggatacattgggattcaggagtgacacagaggtccagccccagaacttgtaaggattttgtttgaacactgagcagatgcctcctccctgccacccatcacactagttagggctggccatgaattctatgccagagtcactcctgcagtctgctagggatgggccttcttatcccactctcgcacacatcccagtctagtctttgccttcacagagtcctccttgacacccctgacttaatgatagttgctgttttggagtagaattgatcaggtttaagtcatcctgctcaggttgggcatagtggctcatgcctgtaatctcagcactttgggaagccaaagtgggaggattgcttgagcccaggagttccaaaccatcctgggcaacagagggagaccctgtctctaccaagaaaaaaaaaaaaaaagtcgacgcggccgcgaatttagtagtagtaggcggccgctctagaggatccaagcttacgtacgcgtgcatgcgacgtcatagctcttctatagtgtcacctaaattcaat

SEQ ID NO: 352 - DNA, 1689 bp, Homo sapiens
  modified_base (15)..(15): a, c, g, or t
  modified_base (17)..(18): a, c, g, or t
  modified_base (20)..(22): a, c, g, or t
  modified_base (25)..(25): a, c, g, or t
  modified_base (1137)..(1137): a, c, g, or t
  modified_base (1415)..(1415): a, c, g, or t
  modified_base (1471)..(1471): a, c, g, or t
  modified_base (1526)..(1526): a, c, g, or t
  modified_base (1533)..(1533): a, c, g, or t
  modified_base (1536)..(1536): a, c, g, or t
  modified_base (1542)..(1542): a, c, g, or t
  modified_base (1546)..(1546): a, c, g, or t
  modified_base (1558)..(1558): a, c, g, or t
  modified_base (1561)..(1562): a, c, g, or t
  modified_base (1595)..(1595): a, c, g, or t
gctgacgcctactantnntnnnttntttttttttttcagagttttagatattatttattttaaactaaagcaaataacaagttaagtgaaatttgcagttttcactttgcattgtctatttaaaaggcctaggtattggagctgaaatgctgaagaggctaagtcaggtatgtattacaattagtattgatattctatacattaaccttttcttaataaatattcacagggcataaattaaatcattaatctcaccatttgaacataaccccaacatatacttcaaatttctacccaaattaaactggattttcaaatcagatgatcatatacagtatatgaattatagtcaattaaaattgatttatatataatccacaaccacactatacaccctttttgctatcaagggaaagtaagaaggagggagattagaaagcatttttattcaaaaacacaggctcacagtatgaatattacaagactataaaagcaagatcttcttgtattttggaaacatatgagaacatgtgttcttttaggtacaccttttctgtatgataaaggctttgcaaatcagttttgagattttaaagagggctttaaagctcagaacagtgagacttttttctttttacagctatagaaaagttcaaaaggtaactactatatttggaagtattattcacacatagtgtcttgcatagagtagaccttcaataaaatatatgtgttaacgaagattatactttcaaatgaaagtaatatttgcttgtttgtttttaaacagatagccatcacaactcaatgtaactgcatgcactttcttgtcgtcatttggaaccaggcttctatcaactactatactagtcgaggggctttagacctttcctctgaggagggctggcatctcttcaggtttaacagagaagaactcctggacatggcatgggaagaatgaaagaggctttgtaacaactcatcccaacacagcctccaacatttgactgtcacctgagtctaacagcagtttgactttgttgtacaatacagcaagtgatcatcacattcttgtttgagcagatcttttattttgaaacagattttgtagctctagtcaactttccattatccaanccaatattctaacggctagtagcagtagtgataatccaaaagagcagataatttaaaagtcacttatacttagctttgcgctattttttacctatcatatttcatcaaaattaaggtgcttttcacaatttgacatatctgatgtcgggataaatgtaatgatcaactggcagcattttttgtttgtttgtttttagaggcaggatcttgctatgttgctcaggctggtctcaaacttttggcctcaagcaatcctcccacttcagcctcccagacanaagcaactctgctcagcctttttttttaaattaaaggtatatgatatgccttaganttgatgaaatatgggtgtttgaatatattcagatctgaggtttaaaaaaattcanttcaaanacnggaganaaantctgaagagccnacnnatgaaaaactagcaagtaaactgcttccctacnttgagcagcttaagtaccactgcctccttgacatcatcccagtactacattctatctctgaacatccatagctctttggttgtacttatcttag

SEQ ID NO: 353 - DNA, 976 bp, Homo sapiens
  modified_base (210)..(243): a, c, g, or t
  modified_base (321)..(321): a, c, g, or t
  modified_base (442)..(442): a, c, g, or t
  modified_base (475)..(475): a, c, g, or t
  modified_base (507)..(507): a, c, g, or t
tggattttcagcatgcctctgaagatgcaaggaagaccataaaccagtgggtcaaaggacagacagaaggaaaaattccggaactgttggcttcgggcatggttgataacatgaccaaacttgtgctagtaaatgccatctatttcaagggaaactggaaggataaattcatgaaagaagccacgacgaatgcaccattcagattgaatnnnnnnnnnnnnnnnnnnnnnnnnnnnnnnnnnnaagaaaatttcactgccgaccatccattccttttctttattcggcataattcctcaggtagcatcctattcttggggnagattttcttccccttagaagaaagagactgtagcaatacaaaaatcaagcttagtgctttattacctgagtttttaatagagccaatatgtcttatatctttaccaataaaaccactgtncagaaacaagtctttcattttctttgtaagttnggctctgttggctgtttacacccatgaatttnggcatgggtatctatttttcttttttacattgaaaaaaatccagtggttgcttttgaatgcatcaagtaaagaagaagaaaagaatacatccgatgcgtagattcttgaccatgtagtaatctataaaattgctatatcctcctgatagccatgggaaaacatgataagatggtcatttattttgcagttagaattttggaagccacaaaatagacagacaccctgactgttgaagggaggtttaaaaacagatattcaattgaaatgtaagagagcaccccaattgagagcccaggttacgaagacaagcttgcctcgcctgacttttctgtcccttgttctgcaggattagtattctgttacagacctctagtttttagactcttcaattaaagggccaatggttataacctgcaaaaaaaaaaaaaaaaaaaaaaaaaaaaaaaaaaaaaaaaaagggcggccgct

SEQ ID NO: 354 - DNA, 470 bp, Homo sapiens
  modified_base (123)..(123): a, c, g, or t
  modified_base (127)..(127): a, c, g, or t
  modified_base (447)..(447): a, c, g, or t
tttttttttttttttttttttttcacaagcacgtgcactttattgaatgacactgtagacaggtgtgtgggtataaactgctgtatctaggggcaggaccaagggggcaggggcaacagcccnagcngtgcagggccagcattgcacagtggagtgcaaaggttgcaggctatgggcggctactagtaaccccgtttttcctgtattatctgtaacataatatggtagactgtcacagagccgaataccagtaacaggatgaatccaatggtcatgaggatgcccagaatcagggcccagatgttcaggcacttggcggtggaggcataggcctgggccccggtcacgtcgccaaccatcttcctgtccctagacttcacggagtaggcgaatgctatgaagcccagacagcaccagttcaagaagagggtgttgaacagggaccanacgacatggtcgggcacggaggt

SEQ ID NO: 355 - DNA, 345 bp, Homo sapiens
  modified_base (23)..(24): a, c, g, or t
  modified_base (344)..(344): a, c, g, or t
ttttttttttttttttttttttnnttaacattccaaacatgtataaccaattaacatggcctagggttttctttttattggtattcacttcagtaacttgaatccacagatataagcagtatataaccagaaagttacaagtaaacacaaattatacatgcaaatttctgttcacaaaggtcacatgtgcaggtacatgaattagaagcgtgcatctaggattatggccaaactgttttaaaaatgcagaaatgtaaaattacatcttgaaaatatgaagagatggtctacacacttcaaaaatcaaatgttgcttataccagagatgtatgacaatcacgggnt

SEQ ID NO: 356 - DNA, 1896 bp, Homo sapiens
  modified_base (79)..(84): a, c, g, or t
  modified_base (86)..(88): a, c, g, or t
  modified_base (90)..(92): a, c, g, or t
  modified_base (94)..(94): a, c, g, or t
  modified_base (96)..(97): a, c, g, or t
  modified_base (100)..(104): a, c, g, or t
  modified_base (106)..(109): a, c, g, or t
  modified_base (111)..(112): a, c, g, or t
  modified_base (114)..(114): a, c, g, or t
  modified_base (116)..(121): a, c, g, or t
  modified_base (123)..(125): a, c, g, or t
  modified_base (210)..(210): a, c, g, or t
  modified_base (259)..(259): a, c, g, or t
  modified_base (270)..(270): a, c, g, or t
  modified_base (281)..(281): a, c, g, or t
  modified_base (285)..(285): a, c, g, or t
  modified_base (370)..(372): a, c, g, or t
  modified_base (374)..(374): a, c, g, or t
  modified_base (376)..(378): a, c, g, or t
cgtggcttgatcaccccctccccaataaagctaaaactcacctgagttgtagcttgagtgaagtggcgtgatcttggcnnnnnncnnncnnngncnntgnnnnnannnnanncncnnnnnntnnngtgctctatgcccaggtctctgtggctgggctgctccagcctggcggacagcatgccttcgctgcgatgcctgtataacccaggnactggcgcactcacagctttccagaattcctcagagagagaagactgtnataatggcganccccctaggangatnataccagagaagaattcacttagacagacatacaacagctgtgccagactctgcttaaaccaagaaacagtatgtttagcaagcnnngntnnnaagactgagaattgtgtggccaaaacaaaacttgccaatggcacttccagtatgattgtgcccaagcaacggaaactctcagcaagctatgaaaaggaaaaggaactgtgtgtcaaatactttgagcagtggtcagagtcagatcaagtggaatttgtggaacatcttatatcccaaatgtgtcattaccaacatgggcacataaactcgtatcttaaacctatgttgcagagagatttcataactgctctgccagctcggggattggatcatatcgctgagaacattctgtcatacctggatgccaaatcactatgtgctgctgaacttgtgtgcaaggaatggtaccgagtgacctctgatggcatgctgtggaagaagcttatcgagagaatggtcaggacagattctctgtggagaggcctggcagaacgaagaggatggggacagtatttattcaaaaacaaacctcctgacgggaatgctcctcccaactctttttatagagcactttatcctaaaattatacaagacattgagacaatagaatctaattggagatgtggaagacatagtttacagagaattcactgccgaagtgaaacaagcaaaggagtttactgtttacagtatgatgatcagaaaatagtaagcggccttcgagacaacacaatcaagatctgggataaaaacacattggaatgcaagcgaattctcacaggccatacaggttcagtcctctgtctccagtatgatgagagagtgatcataacaggatcatcggattccacggtcagagtgtgggatgtaaatacaggtgaaatgctaaacacgttgattcaccattgtgaagcagttctgcacttgcgtttcaataatggcatgatggtgacctgctccaaagatcgttccattgctgtatgggatatggcctccccaactgacattaccctccggagggtgctggtcggacaccgagctgctgtcaatgttgtagactttgatgacaagtacattgtttctgcatctggggatagaactataaaggtatggaacacaagtacttgtgaatttgtaaggaccttaaatggacacaaacgaggcattgcctgtttgcagtacagggacaggctggtagtgagtggctcatctgacaacactatcagattatgggacatagaatgtggtgcatgtttacgagtgttagaaggccatgaggaattggtgcgttgtattcgatttgataacaagaggatagtcagtggggcctatgatggaaaaattaaagtgtgggatcttgtggctgctttggacccccgtgctcctgcagggacactctgtctacggacccttgtggagcattccggaagagtttttcgactacagtttgatgaattccagattgtcagtagttcacatgatgacacaatcctcatctgggacttcctaaatgatccagctgcccaagctgaacccccccgttccccttctcgaacatacacctacatctccagataa

SEQ ID NO: 357 - DNA, 1760 bp, Homo sapiens
aaaacgtttgtatctcaagcaagtgctacaatgcaacagtatgcacagagagataagaaacatgaatattggtttgctgtgccacaagaaaggacagatcacttgtatgccttcttcattcagtggagtccagaaatatatgcagaagatactggcgaatataccagagaacctggatttatagtagtaaaaaagattgaggagtctgaaacaattgaggattctagtaatcaagcagcagccagagaatgggagattactacaagggaagacataaattcaaagcaggttgctacagtgaaagcagacctggagtctgaatcttttcgaccaaacctaagtgatcccagtgaacttttactgccagatcaaattgaaaagcttaccaagcatcttccaccaagaacaattggctatccatggactcttgtttatggtactggaaaacatggcacaagcttgaaaactctttatcgaacaatgacaggtttagacaccccagtgctgatggtgattaaagacagtgatggacaggtttttggtgcgttagcatctgagccactgaaagtgagtgatggcttttatggtactggagagacctttgtttttacattctgtccggagtttgaggtctttaagtggacaggagatgatatgttttttatcaaaggagacatggattcactagctttcggtggtggaggaggagaatttgcgctttggcttgatggagatctctaccatggaagaagccattcttgtaaaacgtttgggaatcgtacactttctaagaaggaagatttctttatccaagatattgaaatctgggcttttgaataaataaaatgctctctgtcttagcaggagaatggcccaaacctgacatggacaagcattgtttggaaagttcaagaagcaatacagtgtaacatgtcacttgtgctttaaaattagtctgtatcaccatttattacagttataattttggagtttatttttcaaatcatgttcttgtcccagagttctttaggttaacactagggactgcgtccatgtactagtataacagcttgggtttgttagaatttgggcaacattttgattataatgacaacttcattttcacatgttactcagttccctaataggatggtgctcttttgttgaacctgtattgatttttttttttttaactatattgattcgtttactagaacagtctaattggggcattgaggaaatgaagactggatacttctgtatctgtgaagttggcacaggtaacatttggacatgttcatcttattcttaggaaggaaaaaatcacttgccaaaataatacatacttcatagaccactgagttctagtttttattcacactacaacattctctttaacgatgttgcaggtattctcaatttccttttaagaaaaatgaaatgtgaggagaattctggttgtaatagatgacagtacatatgatctgcaggtttgggcatatgctttcatcattaaattatctgataaagttacaagtcacaaaggagaatgagaacttaatgattctattggatttaatatattagcaagaaaacatactatttacatatgtgtagcttagtaaggcattaacataagtacaaaaactatgaaacagatgcatatttcctcaacatactgtgtcaggtatactgttttataatttggttgttttagccttattgcacaccaactcccaaaatataggttactcttgttc

SEQ ID NO: 358 - DNA, 1474 bp, Homo sapiens
agacgccgggggcggacgggaggaccggaggaccgaggacagaaagattggtggacaggagcagcggccggtggggagggcgctcggcggcggcctgcggccatggccaccgtgatggcagcgacggcggcggagcgggcggtgctggaggaggagttccgctggctgctgcacgacgaggtgcacgctgtgttgaagcagctgcaggacatcctcaaggaggcctctctgcgcttcactctgccgggctccggcactgaggggcccgccaagcaagagaacttcatcctaggcagctgtggcacagaccaggtgaagggtgtgctgactctgcagggggatgccctcagccaggcggatgtgaacctgaagatgccccggaacaaccagctgctgcacttcgccttccgggaggacaagcagtggaagctgcagcagatccaggatgccagaaaccatgtgagccaagccatttacctgcttaccagccgggaccagagctaccagttcaagacgggcgctgaggtcctcaagctgatggacgcagtgatgctgcagctgaccagagcccgaaaccggctcaccacccccgccaccctcaccctccccgagatcgccgccagcggcctcacgcggatgttcgcccctgccctgccgtccgacctgctggtcaacgtctacatcaacctcaacaagctctgcctcacggtgtaccagctgcatgccctgcagcccaactccaccaagaacttccgcccagctgggggcgcggtgctgcatagccctggggccatgttcgagtggggctctcagcgcctggaggtgagccacgtgcacaaagtggagtgcgtgatcccctggctcaacgacgccctggtctacttcaccgtctccctgcagctctgccagcagctcaaggacaagatctccgtgttctccagctactggagctacagacccttctgatcacagcacccaggagcttgtctccaggaaggcggccccgtcccctactcatacccaccacagagcaccagccagtgccaacgccaggctgctatttatctccctatcccaccccctaccccacctaacacatttgcactgccaggaatggacactggaagtgccaggaggaaggaaggctggtttggtggggtagtggggaggtcagggaggcggggccaagggtgtcccacattcccaacaccgccctctgatcaccatgggaatctttggactcaggacagggccaggtgcagggctctccctcctctccccttcgctgtcccctccccctggagggcatggtgtcggggggtggcactgagctatgagtcccggggatggtgaggaacgccacagacagagccaccctaggagtgagtatagtgctggtgactgtgtttcatagccccagtccagggctgtctaagaaataaagatcatcagactccaaaaaaaaaaaaaaaaa

SEQ ID NO: 359 - DNA, 2058 bp, Homo sapiens
cggtgctagcgacacgggagtggcaaacgcatcctcttgccgttcccggtgtttgggccttgcctgtgacggtgggaaaagaaaatggccttgctgtgctacaaccggggctgcggtcagcgcttcgatcctgagaccaattccgacgatgcttgcacataccacccaggtgttccggtctttcacgatgcattaaagggttggtcttgctgtaagagaagaacaactgatttttctgatttcttaagcattgtaggctgtacaaaaggtagacataatagtgagaagccacctgagccagtcaaacctgaagtcaagactactgagaagaaggagctatgtgaattaaaacccaaatttcaggaacacatcattcaagcccctaagccagtagaagcaataaaaagaccaagcccagatgaaccaatgacaaatttggaattaaaaatatctgcctccctaaaacaagcacttgataaacttaaactgtcatcagggaatgaagaaaataagaaagaagaagacaatgatgaaattaagattgggacctcatgtaagaatggagggtgttcaaagacataccagggtctagagagtctagaagaagtctgtgtatatcattctggagtacctattttccatgaggggatgaaatactggagctgttgtagaagaaaaacttctgattttaatacattcttagcccaagagggctgtacaaaagggaaacacatgtggactaaaaaagatgctgggaaaaaagttgttccatgtagacatgacttgcatcagactggaggtgaagttaccatttcagtatatgctaaaaactcacttccagaacttagccgagtagaagcaaatagcacattgttaaatgtcattattgtatttgaaggagagaaggaatttgatcaaaatgtgaaattatggggtgtgattgatgtaaagcgaagttatgtaactatgactgcaacaaagattgaaatcactatgagaaaagctgaaccgatgcagtgggcaagccttgaactgcctgcagctaaaaagcaggaaaaacaaaaagatgacacaacagattgagtgggagatggaaggaaggctattacattatttccgaatttttaatactgtgtgaagtggtggcttgctgctgtaatcttttgttttgttgttgtgttactgaatgtggcatttcagggttaacattaggttcttaaaagccaaagtcagtttgtctttttgtgcctctcatctttcttttgtgttatgtaagattgattattcatttctccctactggtaggaaccatagttgtgtcctatacttgaagaggctggaaagtagcccataaccataattgcagtatttctttgtatttctctgttaagcaaagaaatattaaggaacattttttttatgtttttgtattattccataattagtaaagcaagatgaaatgtcaaattttaatcagttttttcatggatttgtgttcttacagtacttgaaaatatttaaggaagagatgaagctctgcagttttttctatgtgggatgattacttttttaaggaggattaattctgaggtagtatagtaactaaaggggaatatatgaattgtttaacaaattagaatttgtttacaactacttgaatttttaaattatgtcaaaacttacattacttgccaagcagtatgatgttataggaaacataaataagattacagaggtatcaatttggttaaaattcaccattttataagactaagcaataatcttaacaacctctttcctgaatatttaaatgtgtttgtatggtgttatgactaattgttactgatttagagactaagccctcttaaaacctttagttaaatataaaaagaaattatatatatcttgcctccctgatggaaaactatataaaattgtagacttaaaaggtttgtggaaatacattaggatatcagaaaactaaatatatggagttgctttatgactattacatgttaaataaaaatagcttaattgttaaaaaaaaaaaaaaaaaaa

SEQ ID NO: 360 - DNA, 1271 bp, Homo sapiens
tgggcgcggccatgttggaggctccgggcccgagtgatggctgcgagctcagcaaccccagcgccagcagagtcagctgtgccgggcagatgctggaagtgcagccaggattgtatttcggtggggccgcggccgtcgcggagccagatcacctgagggaagcgggcatcacggccgtgctaacagtggactcggaggagcccagcttcaaggcggggcctggggtcgaggatctatggcgcctcttcgtgccagcgctggacaaacccgagacggacctactcagccatctggaccggtgcgtggccttcatcggtcaggcccgcgctgagggccgtgcggtgttggtgcactgtcatgcaggagtcagtcgaagtgtggccataataactgcttttctcatgaagactgaccaacttccctttgaaaaagcctatgaaaagctccagattctcaaaccagaggctaagatgaatgaggggtttgagtggcaactgaaattataccaggcaatgggatatgaagtggatacctctagtgcaatttataagcaatatcgtttacaaaaggttacagagaagtatccagaattgcagaatttacctcaagaactctttgctgttgacccaactaccgtttcacaaggattgaaagatgaggttctctacaagtgtagaaagtgcaggcgatcattatttcgaagttctagtattctggatcaccgtgaaggaagtggacctatagcctttgcccacaagagaatgacaccatcttccatgcttaccacagggaggcaagctcaatgtacatcttatttcattgaacctgtacagtggatggaatctgctttgttgggagtgatggatggacagcttctttgcccaaaatgcagtgccaagttgggttccttcaactggtatggtgaacagtgctcttgtggtaggtggataacacctgcttttcaaatacataagaatagagtggatgaaatgaaaatattgcctgttttgggatcacaaacaggaaaaatatgaacatgatattttatagcttgggaagaaacttgcagatgatatgtgctgcctttgcttcttatcattcatggcagattgttagtgctttcaacatttcatttgaaatgggagaagataaaatcacttgatgtaacctggaaactatgctttacatggcaatcaaagccttttgatcatgtacattttatttgatattaaaatcttttataaccagaaaaaaaaaaaaaaaaaaaaaaa

SEQ ID NO: 361 - DNA, 1535 bp, Homo sapiens
cgatatgccacacagtacttccaggtggagggataccgccaatgacaatgagggccactcggatggcctggcaagaagagggagaggcgagagttcaagtggctatcccgagccaaagtaccctgaagacaaacgggaagcgaggagtgaccaagtgaaaccagaaaaggtgccgagacgacgacgcaccatggccgaccctgacttctggacgcacagtgatgattactacaaatactgcgacgaagactctgacagtgacaaagagtggattgctgctctgcgtcggaaatatcgaagccgagagcaaaccctgtcctccagtggtgaaagctgggagactctgccggggaaagaagagcgggaacctccacaggctaaggtgagtgccagcactggcaccagccctggccccggtgctagtgccagtgccggggctggcgccggggccagtgctggcagcaatggcagcaattaccttgaagaagttcgagaaccatcccttcaggaagagcaggcatccctggaagaaggagaaattccttggctccagtaccatgagaatgacagtagcagtgagggggataatgattctggtcacgagttgatgcaacctggggtattcatgctggatggaaacaacaaccttgaagatgactccagtgtgagcgaagacctagaagtggattggagcctctttgatggatttgcagatgggttaggagtggctgaagccatttcctatgtggaccctcagttcctcacctacatggcacttgaagaacgcctggcccaggcaatggaaactgcccttgcgcacttggagtctctcgcagtggatgtagaggtggccaatccaccagcaagcaaggagagcattgacgctcttcccgagatcctggtcactgaagatcatggcgcagttggtcaggagatgtgctgccccatctgctgtagcgaatatgtgaagggggaggtggcaactgagctgccgtgccaccactatttccacaagccgtgtgtgtccatctggcttcagaagtcaggcacctgccccgtgtgccgctgcatgttccctcccccactctaaagaccaaggccgtttactcctggtctgattattttccccatctgaaatccacaatactgcaggagccctcttgaaattaacaatggaaataaaaccaatcagtcagttagcctaaacctattgattcctcgtgattatttccaatgtgaaaacagttgtgtatgattgcattaaaaatcatatcatcttttagaggttagaaaagggaaaactaaactttctaaatgctacttgagattgcagtaagaagatacgttttctaacctgaaagttaaatcgcatttgttttcttcagtagaatgggaatgtgttgctgttacttgtaatgtcaagtttatctgttaaatatgtccaaaaggcaaaatcatttttgttgcatgttatgggtcgatgttcctgtaattgcagtgccgtaaaagcttattaaagttgttcttttggtttt

SEQ ID NO: 362 - DNA, 1226 bp, Homo sapiens
gctgccgcatcccaggctaagcgccgcgccgaaagccgtgcggagattggaggccgcgcgggtccctggtctgggccatgtctggctgtgatgctggggagggagactgttgttcccggagatgcggcgcgcaggacaaggagcatccaagatacctgatcccagaactttgcaaacagttttaccatttaggctgggtcactgggactggaggaggaattagcttgaagcatggcgatgaaatctacattgctccttcaggagtgcaaaaggaacgaattcagcctgaagacatgtttgtttgtgatataaatgaaaaggacataagtggaccttcgccatcgaagaagctaaaaaaaagccagtgtactcctcttttcatgaatgcttacacaatgagaggagcaggtgcagtgattcatacccactctaaagctgctgtgatggccacacttctctttccaggacgggagtttaaaattacacatcaagagatgataaaaggaataaagaaatgtacttccggagggtattatagatatgatgatatgttagtggtacccattattgagaatacacctgaggagaagaccctcaaagatagaatggctcatgcaatgaatgaatacccagactcctgtgcagtactggtcagacgtcatggagtatatgtgtggggggaaacatgggagaaggccaaaaccatgtgtgagtgttatgactatttatttgatattgccgtatcaatgaagaaagtaggacttgatccttcacagctcccagttggagaaaatggaattgtctaagccaaaagaaagtctaattatatacagagataaagctaaacgtaattattatttaaatgaaagctatttttttaaatgaattgaaatttttcatgatgctactaatttgccactaaatactgcaaatggtcaccctgaatctcttctgacattggatgttatttgcttatattcttataattttaaatgagggcacagtgaaatgaaaattttatactctatgtttctgtttatttttaaatccttaacagcaaaatatttgcctttaatttcttttttatatatactctcgagagaattcctcttaatttttaaagatgctggtgataataaaattcattagaaaatttcctcattgtggaatgagcattctcttgttttaatgttggtgtcagaaaataaatatgaaacattaagtcc

SEQ ID NO: 363 - DNA, 2540 bp, Homo sapiens
attgggctgttgagcgggggccgaccgacggccaggagtttcttttctgcgcttgtgcgttttctgttcggtttccttcccgctagcggggccacgagggttgctaggcaacagcccctgggtgacttggtcttagggtcctgtccggcttggggctgatgaaaggagctgtccgcgcccgggctcttccgagaagtggttgctgacagccacaaagtgaaagggagtgaggcggcgtggacgagtaaggagtgacagtgaggattcacatttgggttatttcaagatgagcttcctactgcccaagctgactagcaaaaaggaagtagaccaggcgataaaaagtactgctgagaaggtgttggttctcaggtttgggagagatgaagatcctgtctgtctgcagctagatgatattctttctaagacctcttctgacttaagtaaaatggctgctatatacctggtggatgtggaccaaactgcagtttatacacagtattttgacatcagttatattccatctactgtctttttcttcaatgggcagcatatgaaagtggattatggatctccagatcacactaagtttgtgggaagcttcaaaaccaaacaagacttcatagatttgattgaagtaatctatcgaggagcaatgagggggaagcttattgtccaaagtcctattgatcccaagaatattcccaaatatgaccttctctatcaagacatttagtacattaattgctgtcaaagatgaagaagaaggcacatcttgacacagtacctgaatccagctgtgctgtgtttctggagtcctttggaaacatgtgtcccagaggagaagaggtttgacttgcgtgtagaaaacccggcccctgaggaaaagaccccactggttctctgatgacctgggatgcctaactgtctactccctgcaagcctcagagcagccaagtcattggtgttcattttccccacagtgatttttgtaacttctctttctaatgtttttctttatccctttaatacagaaccctcccaaacattggctagtacaacttgatttcatcatgttcatttgatacacaagtgaactggaaagtcacttcccatagaagcaaaagtacttattttctaccctagctgggtgcatgtgtgtgcacacacacacacacacacacccccacacccctttgccggttcctcgactcatacatccctcgtgctttcccatctccagtctgtattactgtaggttctcttcaaataattaattgagcagacaagtttgttttattttggagcctttttggctctggcttttaaacattgtcctggttggctcatttaattttttttttttttttgagaccgagtcactcttgtcacccaggctggagtgcagtggcgcgatctcggctcactgcaagctccacctcctgggttcatgccattctcctgcttcagcctcctgagtagctgggactacaggcgcccgccaccatgcccagctaattttttgtatttttatagaggcgcagtttcaccgtgttagccaagatggtctcgatctcctgacctcgtgatctgccctcctcagcctcccaggtgctgggattataggcgtgagccaccgcgcgcaccccatttaattattttttatgttataaaatttaatatggaaagtgagaatttgaaccttcaccatccaccactctattcaggtaaaacaatgaatgagccaccttagcaggagcagatttttcccagaagctgctgcctcttcctgaggcagaaaattggattactaaggctcaaaactaaaagagatgtcagcattgttggatagaaatgtcacctatatgggatttgcctgttttaataactttgtaaggaattcttgctcttctaggggtgcctggcgcaaccgtgggcaagttactgctcctctttaaacctcgtggtggttattgaaacagatttattagaaggagagggtaggtgcagagctggagagccatgggtgaggcagcttgtgacctgcctagcagccgctgaccacctctccaacagaagcctagtcctgttcagagcagcactgtcactgcaagtccagccccctttgccaggggctccattccacccctttcctgcagggaggggtgccatgagtcttgcttttggctcatacaggagagagggaaggctgccaggcactgcttgtatccctgctgataagaggagggagtcactccaggaataagacaaaaggagaggaggaggccatcacctctggcctcttccatcgtacacttcctgtctctggtttaatcatgatgcatggagctacaacagccatcttaggtccccgaggtgcccagcatcacgtaaaacatcgatatgctaagaagaacaaaaagagcccaatctctgatgttattgagctcctgcatgaactctggacctgcctgcctcagacttctgtgaaagaataaaatttctttttgcctaaaaaaaaaaaaaaaaaaaaaaaaaaa

SEQ ID NO: 364 - DNA, 4368 bp, Homo sapiens
cgaaatgagagcaaaaagggagagagcaggaaagcgagcacaggcgagtacagtatacaaagtgttttgagtttctgactggcgtgccggaaagatcatgttagcacacccagaaactccacacgatgcagaccccagaggtaccagcagaaaggtcccctcgtagacggagtatctcagggaccagtacatcagagaaacccaactccatggacactgcaaatacctcacccttcaaagtaccaggattcttcagcaagcgcctgaaaggctccatcaagaggaccaaaagccagtcaaagcttgacagaaacacgagctttcggcttccatcccttcgcagtacagatgacaggtctcgtgggctgcctaaactaaaagagtcacgttcccatgaatccttgctgagcccatgcagcacagtggaatgtctggatcttggtagaggggaacctgtatcagtgaaaccacttcatagtagcatccttggacaagacttctgctttgaggttacctacttaagtggaagtaaatgcttcagctgtaattctgcttctgagagagacaagtggatggaaaaccttcgcaggacagttcaacctaataaggacaattgcaggcgagctgaaaatgttcttcgtttatggatcattgaagccaaggaccttgcccctaaaaagaaatatttctgcgaactgtgccttgatgataccctctttgctcgtacaaccagcaagaccaaagcagacaatattttctggggcgaacattttgaattcttcagccttccacctcttcatagtatcacagttcacatttacaaggatgtggaaaaaaagaaaaaaaaggacaagaataattatgtagggctagtcaacatccccactgccagtgtgactggtcgccaatttgtagaaaagtggtatccagtgagtacacctacacccaacaaaggaaagacaggaggaccttctattcggattaaatcacgtttccaaactatcaccattctgcctatggagcaatacaaagaatttgcagaatttgtcaccagcaactacaccatgctgtgttctgtccttgagccagtaattagtgtgagaaataaagaggagttggcttgtgccttagtgcacattcttcaaagtactggcagagccaaggattttctgactgacttggtgatgtctgaggtggatcgttgtggagagcatgatgtcttgatcttcagagagaacactattgccaccaaatccattgaggaatacctcaagttggtgggacaacagtatcttcatgacgcactgggggagtttatcaaagctttgtatgagtccgatgagaactgtgaagtggatcccagcaaatgttcatctagtgaactgatagaccatcagagcaacctgaaaatgtgctgtgagctggctttctgcaagatcatcaactcttactgtgttttccctcgtgagttgaaagaagtgtttgcatcatggaagcagcagtgcctgaaccgtggcaagcaagacatcagcgagaggctcatcagtgcctcattatttctccgttttctgtgtccagccattatgtctcccagtcttttcaaccttatgcaggagtatcctgatgaccgcacatctcggactctaactcttattgccaaggtcattcagaacctggccaactttgccaagtttggtaacaaagaggaatacatggcattcatgaatgattttttagaacatgaatggggtggaatgaagcgctttcttttggagatctctaatccagacaccatctcaaacaccccaggctttgatggttacattgatctgggccgagagctttcagttttgcattccttactgtgggaagtagtttcccaacttgataagggtgaaaattccttcctacaggcgaccgtggcaaaattggggcctctccctcgtgttcttgctgatattaccaagtcattgactaatcctacgccaatacaacagcaactgagacgcttcactgaacataactccagtccaaatgtcagtggaagcctctcctctgggctgcagaaaatatttgaagaccccactgacagtgatttgcataaactaaaatctccaagccaggacaacacagacagctacttcagagggaaaacattattgctggttcagcaagcctcctctcagagcatgacttattctgaaaaggatgaaagggaaagtagccttcctaatggtcggagcgtctccctcatggacctccaggacactcatgctgctcaagtggagcatgcatctgtcatgcttgatgtgcctatacgcttgaccggaagccagctttccataacccaggtggccagcatcaaacagctgcgggaaacccagagcactccccaaagtgcaccccaagtgagaaggcccctgcacccagccttgaaccagccaggtggccttcagcccttgtcgttccagaaccctgtctatcacctcaataacccaattccagcaatgccaaaggcctctatagattccagtttggagaacctaagcactgccagttccagaagccaaagtaacagtgaagacttcaagctcagtggacccagcaatagcagcatggaagatttcactaaacgtagcactcagagtgaggacttctccaggcggcacacggtgccagatagacacatacctcttgctttgccacgacaaaatagtactgggcaggcccagatccgaaaagtggaccagggtgggttaggtgcccgagccaaagccccaccatccctgccacacagtgcttctttacgtagcaccgggagcatgtcagtggtgtccgcagccctggtggccgaacctgtgcagaatgggagccggtcccggcagcagtcctcttcctccagagagagccctgttcccaaagttagagcaatccagagacaacagacacagcaggttcagtcacctgtggactctgccacaatgtccccagtagagaggacagcagcctgggttctgaacaatgggcagtatgaagaggatgtggaagaaactgagcaaaatctagatgaagccaagcatgctgagaagtatgaacaagaaattactaaactgaaggagcgcctgagagtttccagccggcgactggaggaatatgaacgccgcttgctggtgcaggagcagcagatgcagaagctgctgctggaatacaaggcccgactggaggacagcgaggagcggctccgaagacagcaggaagaaaaagatagccagatgaaaagcatcatcagcaggctaatggctgtggaagaggaactgaagaaggatcatgctgagatgcaagcagttattgatgcaaagcagaaaataattgatgcacaggaaaaacggatcgtgtccctggattcagccaacaccagactgatgagcgcgctgacccaagtgaaggagcggtacagcatgcaggtccgcaatggcatctcccccaccaaccccaccaagctttccatcacggagaatggtgaattcaaaaacagcagctgctgacgggctttgtctgtggaaggagacagaaggaaattgacccactctcctatctccagacctttacctagcccctccaggtttacagaatgttgctacttcacaatggcgatgtggtgagaaactcctgaatgaagaaaggaaccttgtctttcagggcataaggcggcgacttccaaggtcaatgcttttcccccacatctctatgtacatagggaacttagttctgggccatgtacagaaaatatcactgtaatataccaaaaggaagttaataatgtagattacctttttgattattgctatttttattattgttttcctcttgttgaaagcactgcagttgttacaggaagtaaagtaggaatgttgtgtgagcgagacatgagcctgtagttcagtaggtagagaccaagcatctatctgatagaacacatggagtgcaataggacattgtgagaaggatttttcagggattcatctactagtttaaaaaccccactctggccctcttgtcctttcagaaaacatgcaaataccaagatccatacaaaacaataatttattccactgatcaaccaagactggttctggttggacagctaatctgatttggggattcactgtttcagaggacacagacaaaagctgttgcatcaaaactggactttaggagtaatttctattgaactcctgtcaatatgtttatttcctctgtctacagcagatgggagtcttctcttttagacaggggctttttgtttttaaccccaattgtaataaagggtgttctttttcctctttagaaaaaaaaaaaaaaaaaaaa

SEQ ID NO: 365 - DNA, 2077 bp, Homo sapiens
agagcaaagaaaaatccaattgcctgcacaataaaaagttgtcagagaagaaagtgaagtctcccctgcatttattttctactttgcgcaggtcgccaagttatcctccccctggttgtggcaaaagcaaatccaaactgaaatctgagcaggacggaatctccaaaacgcataagctgctgcggaggacttgttccagcacagttaagactgatgatgtgtgtgtcacaaagtcacacaggacctttggccgctccttgtccagcgatcccagggcggagcaggctatgacagcaattaaatcgcacaaacttttgaaccgtccttgccctgcagctgttaagtcagaggaatgcctaactctaaagtcgcatagactattgactcgatcttgttctggagatccacgatgtgagcacaacacaaacttgaagccccataaactgttaagcaggtcttactctagtaatctcagaatggaagaattatatggactgaaaaatcacaaattgctcagcaagtcctactccagtgcccccaagtcatccaaaactgagcttttcaaggaacctaacgcagagggcaggaggctctctcttacctcagggcttattggtatcctaacaccatcttcatcttcatcttctcagcttgctccaaatggtgcaaaatgcattccagtacgagaccgtggcttcctggtgcagacaattgagtttgctgaacagcggatccctgtattaaatgaatattgtgtggtttgtgatgagccacatgtgtttcaaaatggccctatgcttaggcctaccgtatgtgaacgggagctgtgtgtgtttgcttttcaaaccctgggagtaatgaatgaagctgctgatgaaatagcaactggagctcaggtggtagatctactagtatccatgtgtaggtctgcgttggaatctcctagaaaagttgtgattttcgagccatatccttctgtggtagatcctaatgatcctcagatgttggccttcaaccccaggaaaaagaactatgatcgagtaatgaaagcactggatagcataacttctatcagagaaatgacacaagcaccatatctggaaatcaagaagcaaatggataaacaggacccccttgctcatcccttactgcaatgggttatatcaagtaatagatcacatattgtgaaactgccagttaacaggcaattgaagtttatgcatactccacatcagttccttcttctcagcagtccaccagccaaagaatccaattttagagctgctaaaaaactctttggaagcacctttgcatttcatggctcacacattgaaaactggcactccatcctgaggaatggtctggttgttgcttctaatacacgattgcagctccatggtgcaatgtatggaagtggaatctatcttagtccaatgtcaagcatatcatttggttactcagggatgaacaagaaacagaaggtgtcagccaaggacgagccagcttcaagcagtaaaagcagcaatacatcacagtcacagaaaaaaggacagcaatcccaattcctgcaaagccgtaacttaaaatgcatagccttatgtgaagtgatcacctcatctgacctgcacaaacatggagagatatgggttgtccccaatactgaccatgtctgcacacgattctttttcgtctatgaagacggccaagtgggagatgcaaatattaatacacaagaaggaggcattcacaaagagatcctccgagtaattggtgatcaaactgctactggttaaaggaccaccatttaattaacatgattcgaaagccttcctcgggttcaaagctggattttgaactgaagaagattataaaattatttattgttattataaacaaaattaaccctttgaatactgattttttttcttagtatttctaagtatctcattaaatacctaaaatggtataagatttatcaattgtagggttatggaatctagtaataaaatttcaacagcacttaaactgaagtttgggttgctcatacaataaacagattgaaaaaaaaaaaaaaaaa

SEQ ID NO: 366 - DNA, 1442 bp, Homo sapiens
  modified_base (5)..(5): a, c, g, or t
  modified_base (11)..(11): a, c, g, or t
  modified_base (15)..(16): a, c, g, or t
  modified_base (18)..(18): a, c, g, or t
  modified_base (20)..(21): a, c, g, or t
  modified_base (24)..(24): a, c, g, or t
  modified_base (26)..(28): a, c, g, or t
  modified_base (30)..(33): a, c, g, or t
  modified_base (35)..(35): a, c, g, or t
  modified_base (37)..(46): a, c, g, or t
  modified_base (49)..(50): a, c, g, or t
  modified_base (55)..(55): a, c, g, or t
  modified_base (195)..(195): a, c, g, or t
  modified_base (210)..(210): a, c, g, or t
  modified_base (219)..(219): a, c, g, or t
  modified_base (223)..(223): a, c, g, or t
  modified_base (310)..(310): a, c, g, or t
  modified_base (313)..(313): a, c, g, or t
  modified_base (331)..(333): a, c, g, or t
  modified_base (410)..(410): a, c, g, or t
  modified_base (412)..(412): a, c, g, or t
  modified_base (460)..(460): a, c, g, or t
  modified_base (464)..(464): a, c, g, or t
  modified_base (481)..(481): a, c, g, or t
  modified_base (483)..(484): a, c, g, or t
  modified_base (512)..(512): a, c, g, or t
  modified_base (520)..(520): a, c, g, or t
  modified_base (524)..(524): a, c, g, or t
  modified_base (599)..(599): a, c, g, or t
  modified_base (610)..(610): a, c, g, or t
  modified_base (616)..(617): a, c, g, or t
  modified_base (621)..(622): a, c, g, or t
  modified_base (625)..(625): a, c, g, or t
  modified_base (636)..(636): a, c, g, or t
  modified_base (644)..(644): a, c, g, or t
  modified_base (652)..(652): a, c, g, or t
  modified_base (661)..(661): a, c, g, or t
  modified_base (670)..(670): a, c, g, or t
  modified_base (676)..(676): a, c, g, or t
  modified_base (682)..(683): a, c, g, or t
  modified_base (693)..(693): a, c, g, or t
  modified_base (705)..(705): a, c, g, or t
  modified_base (715)..(715): a, c, g, or t
  modified_base (1332)..(1332): a, c, g, or t
  modified_base (1364)..(1364): a, c, g, or t
  modified_base (1369)..(1373): a, c, g, or t
  modified_base (1376)..(1377): a, c, g, or t
  modified_base (1379)..(1379): a, c, g, or t
  modified_base (1381)..(1381): a, c, g, or t
  modified_base (1383)..(1383): a, c, g, or t
  modified_base (1385)..(1385): a, c, g, or t
  modified_base (1387)..(1387): a, c, g, or t
  modified_base (1389)..(1389): a, c, g, or t
  modified_base (1391)..(1391): a, c, g, or t
ggggngaagcngggnngncnnggngnnncnnnngngnnnnnnnnnnggnnggggngtgagaggttttctcgctctagggagattcttcaagcaatcactatgtcaacagacacaggtgtttcccttccttcatatgaggaagatcagggatcaaaactcattcgaaaagctaaagaggcaccattcgtacccgtnggaatagcgggtttngcagcaatntgtngcatatggattatataaactgaagagcaggggaaatactaaaatgtccattcatctgatccacatgcgtgtggcagcccaaggcttngtngtaggagcaatgactgtnnngtatgggctattccatgtatcgggaattctgggcaaaacctaagccttagaagaagagatgctgtcttggtcttgtngnaggagcttgctttagttagatgtcttattattaaagttacctattatntgtntggaaataaactaattntnnatgggtttagatggtaacatggcatttntgaatatntggnttcctttcttgcaggcttgatttgcttggtgaccgaattactagtgactagtttactaactaggtcattcaaggnaagtcaagttnaacttnnaaannatngtcacctaaantgcacttngatggtgnttgaaatgntccaccttncttaanattttnnaagatgaacnttagttctaaangaagataacnaggccaatcctgaaggtactccctgtttgctgcagaatgtcagatattttggatgttgcataagagtcctatttgccccagttaattcaacttttgtctgcctgttttgtggactggctggctctgttagaactctgtccaaaaagtgcatggaatataacttgtaaagcttcccacaattgacaatatatatgcatgtgtttaaaccaaatccagaaagcttaaacaatagagctgcataatagtatttattaaagaatcacaactgtaaacatgagaataacttaaggattctagtttagttttttgtaattgcaaattatatttttgctgctgatatattagaataatttttaaatgtcatcttgaaatagaaatatgtattttaagcactcacgcaaaggtaaatgaacacgttttaaatgtgtgtgttgctaattttttccataagaattgtaaacattgaactgaacaaattacctataatggatttggttaatgacttatgagcaagctggtttggccagacagtatacccaaacttttatataatatacagaaggctatcacacttgtgaaattctcttgtctaatctgaatttgcattccatggtgtnaacatggtatatgtattgttattaaagtaagngaccnnnnncannanananananananacacacaccctgagagagagaaagagagagagatcactaaagagagagaac

SEQ ID NO: 367 - DNA, 3208 bp, Homo sapiens
  modified_base (145)..(145): a, c, g, or t
  modified_base (2136)..(2136): a, c, g, or t
  modified_base (2848)..(2848): a, c, g, or t
  modified_base (3014)..(3015): a, c, g, or t
  modified_base (3167)..(3167): a, c, g, or t
  modified_base (3199)..(3199): a, c, g, or t
aaaactcttctcagacccgggagcgtccgggacgcggagcccggagctggggcgacgaggcgattgcgggggcctgggctagctgctggctaccaatattctactttctgtctctatgtatgtgactaccctggttacctcatanaatctccctggaaaaggagacatgaatgtctgcaatgatacttcctgacaagaagttgatacaagaaaaggaaaggagattaacagctagtgagcagaatttcgaacagcaggatttcgtattttttgcttccaactgcacacttccgttgcccacttttaaatcagagatacctacactcaaaacccagacaaggcaaaaggatacttttcttgtatattttttgagatcgaagaaacgacaatgtccaggaaacagaaccagaaggattcatcaggattcatttttgatttgcagtccaataccgtactggcccagggaggagcttttgagaacatgaaagagaagataaatgcggtacgtgcaatagttcctaataagagcaacaatgaaattatcctggttttgcagcactttgataactgtgtggacaaaacagtacaagcattcatggaaggtagtgccagtgaagtactcaaagaatggacagtaacaggcaagaaaaagaacaaaaagaagaaaaacaaaccgaaacctgccgcagaaccaagtaacggcatcccagattccagtaaatcagtttccattcaagaggaacagtctgcgccttcctcagagaaaggtggtatgaatggctaccatgtcaatggtgccatcaatgacactgagtctgtggactcactcagtgaaggtttggagacactttcaatagatgccagagaattggaggatcccgagtctgccatgctagatacgctggatagaacaggatccatgctgcagaatggtgtctctgattttgagaccaagtctttgactatgcactctattcacaattctcaacaacccaggaatgctgccaaatctctctcaagacctaccacagaaactcagttttcaaatatggggatggaagatgttcccctcgccaccagtaaaaagctaagttccaatattgaaaaatctgtaaaagacctccagcgctgcacagtgtctcttgcacggtatcgagttgtagttaaagaagagatggatgcctccattaagaaaatgaaacaagcctttgctgaattggagagctgtttaatggatcgagaagtggcgttgcttgctgaaatggacaaagtgaaagctgaagcaatggaaattttgctcagccgacaaaagaaggctgaacttctaaagaagatgactcatgtggctgttcaaatgtcagagcagcaattggttgagctcagagctgatatcaagcactttgttagtgaacgtaaatatgatgaggatctgggacgagtagcccggttcacctgtgatgtagagaccctaaagaagagcattgattcatttggacaagtgtctcatccaaagaacagctattcgaccagatcccgatgtagctcagttacatctgtgtccttgagtagcccaagtgatgcctctgctgcttcctcttccacctgtgcctctcctcccagccttacaagtgctaacaagaaaaactttgcaccgggagagactcctgcagccatagcaaactccagtggccagccctaccagccacttcgggaggtattgccagggaacagacgaggaggacagggctataggccacaaggccaaaagtccaatgaccccatgaaccaagggcggcatgacagtatgggtcgttacagaaacagctcgtggtattcatctggttccaggtatcagagtgctccatctcaggcaccaggaaacaccattgaaagaggccagactcactctgcagggaccaatggaactggagtcagcatggagcccagccctcccacgccttcattcaaaaaggggctcccccagcgcaaacccaggacctctcagactgaagccgtgaactcttgagagaaaatccagttggcctctctcctctatccacacaattcaacttgataactggactttaggaaacttacagttagatgtaataacaaaaagaagtttatgcgtatcantttttgtgccattctaagtatttttggtttcttgtctccttatttcctctttaccatttttggaggggaagctattttttttccttgatctttcccagtgatatggattgaatctggttggtcatttccaccaggaatcagaggcagctgttaccaggtttcggccttccagttgatccctccactgtccaggctgtctcaggaggaggtgaatcagagctagtctgtcacctttccaatctaagccgaagccacaggtgcctgacaggttcccttctaacaactatttgaccaagagaggcaatcagggggttgtatactgcactggattcgccagagaagggaaaatttaattagtgaaaaggaaagaacactaggaaacatttgagaacctgcctctatcccagaatgtgctggagatttgacactcaaatcagtgtttagtcttctgcttggcaccatagcttaacctgcagtttcttcaaaatgcccaatgccttgtttcctattaccttagattgcaaaccagtctagggaagtctatgagaaagtagcatttaattaaagtttaaaaaaaaaaaggttgggcgttgtggctcatgcctgtaatcccagcactttgggaggctgaggcgggtggatcactaggtcaggagttcaagaccagcctggccaacatggtgaaaccctgtctgtactaaaaatacaaaanttagctgagcatggtggcgtgtgcctgtaatctcagctactcaggaggctgaggcaggagaatcgcttgaacccaggaggcggaggctgcagtgagctgagattgtgccactgcactccagcctgggagacagagcaagactcagtctcaaaaaaaaaaaaaaaanngcatttttctgttttaatgtttggagacttttttttttgttctctccctttcctgaaccctattctgatcctgaaccaaatttatagcaatataattagtgttaatctaaggcattactcatcaaaaaaattgctgcagtctttacagttgnataaataaaaacaactgcataaatatgcccanaaaaaaaaa

SEQ ID NO: 368 - DNA, 3786 bp, Homo sapiens
  modified_base (238)..(238): a, c, g, or t
  modified_base (260)..(260): a, c, g, or t
  modified_base (2002)..(2002): a, c, g, or t
  modified_base (2148)..(2148): a, c, g, or t
  modified_base (2951)..(2951): a, c, g, or t
  modified_base (2954)..(2954): a, c, g, or t
  modified_base (2956)..(2956): a, c, g, or t
  modified_base (3003)..(3003): a, c, g, or t
  modified_base (3005)..(3007): a, c, g, or t
  modified_base (3010)..(3010): a, c, g, or t
  modified_base (3019)..(3019): a, c, g, or t
  modified_base (3021)..(3021): a, c, g, or t
  modified_base (3029)..(3030): a, c, g, or t
  modified_base (3035)..(3035): a, c, g, or t
  modified_base (3037)..(3037): a, c, g, or t
  modified_base (3051)..(3051): a, c, g, or t
  modified_base (3053)..(3053): a, c, g, or t
  modified_base (3078)..(3078): a, c, g, or t
  modified_base (3089)..(3089): a, c, g, or t
  modified_base (3131)..(3131): a, c, g, or t
  modified_base (3166)..(3166): a, c, g, or t
  modified_base (3598)..(3598): a, c, g, or t
  modified_base (3648)..(3652): a, c, g, or t
  modified_base (3758)..(3758): a, c, g, or t
aaaaatgtgtgtttgtgggtgaaatggctgcgcaggtcggagcggtgcgcgtagtacgggcggtggcggcgcaggaggagccggacaaagaggggaaggagaaacctcatgctggggtctccccgcggggagttaaacggcagcgccgatctagcagtggggggtctcaggagaagcgggggcggccgagccaggagccccctctcgctccccctcaccggcggcgtcgcagccgccnacatcctgggccgctgccgccnacgaatgcagccccaactgtcccaggccctgttgagcctcttctcctgccgcctccgccgccaccttcgctggcacccgccgggcccgctgtcgctgcccctctcccggccccaagcacctcggccctcttcaccttctcgcctctgacggtgagcgcggccgggcccaagcataagggccacaaggagcggcacaagcaccatcaccaccgcggccccgatggtgatcccagctcctgcggaaccgatctcaagcacaaggacaagcaggaaaacggcgagaggactggaggggtgcctctgatcaaagcccccaagagagaaacaccagatgaaaatggtaaaacccagagagccgatgattttgtcttgaagaaaataaagaagaaaaagaaaaagaaacaccgagaagacatgcgaggaagacgccttaaaatgtacaataaggaagtacaaaccgtctgtgctggcctgacccgcatcagtaaagaaattctcacccaaggacaaataaatagcacttcaggacttaataaggagtccttcaggtatctgaaagatgaacagctgtgccgattaaatttgggtatgcaagaatatcgggtaccccagggagtacaaacaccttttatgactcaccaggaacattctattcgtagaaatttcttaaaaacaggtactaaatttagcaactttattcatgaggaacaccagtccaatggtggtgctcttgtccttcatgcttacatggatgaactctcatttttgtctccaatggagatggagagattttctgaggagtttcttgctttgacattcagtgaaaatgagaaaaatgctgcttactatgctttagcaatagtgcatggagcggctgcttatctcccagacttcttggactactttgcttttaatttccccaacactccagtgaaaatggaaattctgggcaagaaagatattgaaacaaccaccatttcaaattttcacactcaggtcaacaggacatactgctgtggcacctaccgagcaggtcctatgcggcagataagtctcgttggagcagtagatgaagaagttggtgattatttcccagagttccttgatatgttagaagaatcaccatttctgaaaatgactttgccctggggtacactttctagcctccgactccagtgtaggtcccagagtgatgatgggcctataatgtgggtaaggccaggagaacagatgatccctacagcagatatgccaaagtcacccttcaaaagacgacgatcaatgaatgaaataaaaaatctccagtacctacctcggaccagtgaaccccgcgaagttctctttgaagataggactagagctcatgctgatcatgtcggtcaggggtttgactggcagagtacggctgctgttggagttttgaaagctgtacaatttggtgaatggagtgaccaacctcgcataaccaaagatgtgatttgttttcatgctgaggattttactgatgttgtacaaagacttcagttagatcttcatgaacctccagtttcccagtgcgtacagtgggtagatgaagctaaactaaaccaaatgaggcgggaaggcattcgttatgctagaattcagctttgcgacaatgatatctacttcatccctagaaatgtcattcatcagttcaaaacagtttcggcggtgtgcagcttagcctggcatataaggcttaaacagtaccaccctgttgntggaagccactcaaaacacagaaagcaattctaacatggactgtggtttaactggaaagcgagaattagaagttgactcccaatgtgtgaggataaaaactgaatctgaagaagcatgcacagagattcagctgttaacaactgcntcatcatctttcccacctgcatcagaacttaatctacagcaagatcagaagactcagcctattccagttttaaaagtggaaagtagactggactctgaccagcaacacaatctgcaagaacattcaaccacttctgtgtgatatgtacatattcaaacacattttttaacttttttaaattttgatgtgaagttatagttttataactggcttaagttaagttttattggagaaatcttgcctataattctataaagagaaatgacattccacaaatgtcaagcatatcttttttacacagattatgcaaagttaagagttgtatcttatcccgttagtacagtatgtaatagtgggtctgctgctactttctgttttaaggtgtgaggtaacaattcaatctcttcttcaaatcaaaatgagaattctctggaataacagattcttgtttggtaaattattcacttcccttaattttatcttgccttgtctcttgccatatttgctgtttttatggataaataagatttatggtttagtacttgtgtctttatggcacaggttcaatttctacagtgaaaatggcataggttgcaggaaagaatttctgcatctggtacatgggcaagtaagttatttagttctaaccacaaataacaagtagtttccaaggaaatttcagtggctctctggtttcttaacaaaagagaaagcacagcactttctgatccaaactgtcttttttttgtatctgttatttaaagcccagtggatatttcaattaaaaaaaaaatctaaagatnaanantccttggtcattcattatccatggctcattaatctcttctagaatanannntanctgttgaananattttggnnaaaananataatgttgacatnanactctattgttctgcttcctggcancctcacatttngtggggataattttgcttcctaaactgatcacaactattaancttagagaataataatagtctttctgatgaggctnccatattttgagcatcaatcttatgataaactattcttgtcacttggcatcaacctcttcatgataaatatctactactgagacacttcaattcacagttttaactggtgaatacctgggtttatttactattactctgtgttgctattttctaagaaagaatacagcactagacttcatcctagagtttcaggtaggctaatgcttagtgcctgagtatttaaattttcttttcaaacaggcacagttcacattgctagtatggtcctaactttctgttattttagaatgttaacatgattcacattatactttctcttagttaataatacagtaggccttttgtttattaatggaagagtactccccacacctaagaccagattcttatatctccctggttacagtgcaatttggagatttttttttttncctggatggtaagatttgaaatatttacattaacataggcaaaaaaaaannnnnttttgaaatatcaaatatgaatcttctctaaaatattctgaaataggttaaatcttatataaatattactttgtgcaatatagctgtgtagttaaatgcatattancaaagtatagaggtcactgtgtaaaccg

SEQ ID NO: 369 - DNA, 1067 bp, Homo sapiens
tcgaccggctgcgagaagacgacagaagggggccgcgggacatccacggggcgcgagtgacacgcgggagggagagcagtgttctgctggagccgatgccaaaaaccatgcatttcttattcagattcattgttttcttttatctgtggggcctttttactgctcagagacaaaagaaagaggagagcaccgaagaagtgaaaatagaagttttgcatcgtccagaaaactgctctaagacaagcaagaagggagacctactaaatgcccattatgacggctacctggctaaagacggctcgaaattctactgcagccggacacaaaatgaaggccaccccaaatggtttgttcttggtgttgggcaagtcataaaaggcctagacattgctatgacagatatgtgccctggagaaaagcgaaaagtagttatacccccttcatttgcatacggaaaggaaggctatggtagtcttgaagaagtctttcttctgcaaaatatccttgtctcatgtcacagaacaaccctgcatgtcttgaaatgcatgtacttgttagtgcttaataacaatacatgcgcagaaggcaagattccaccggatgctacattgatttttgagattgaactttatgctgtgaccaaaggaccacggagcattgagacatttaaacaaatagacatggacaatgacaggcagctctctaaagccgagataaacctctacttgcaaagggaatttgaaaaagatgagaagccacgtgacaagtcatatcaggatgcagttttagaagatatttttaagaagaatgaccatgatggtgatggcttcatttctcccaaggaatacaatgtataccaacacgatgaactatagcatatttgtatttctactttttttttttagctatttactgtactttatgtataaaacaaagtcacttttctccaagttgtatttgctatttttcccctatgagaagatattttgatctccccaatacattgattttggtataataaatgtgaggctgttttgcaaacttaaaaaaaaaaaaaaaaaaaaaaa

SEQ ID NO: 370 - DNA, 4245 bp, Homo sapiens
  modified_base (18)..(19): a, c, g, or t
  modified_base (21)..(22): a, c, g, or t
  modified_base (25)..(28): a, c, g, or t
  modified_base (41)..(41): a, c, g, or t
  modified_base (43)..(43): a, c, g, or t
  modified_base (45)..(45): a, c, g, or t
  modified_base (60)..(60): a, c, g, or t
  modified_base (548)..(548): a, c, g, or t
  modified_base (551)..(552): a, c, g, or t
  modified_base (555)..(555): a, c, g, or t
  modified_base (1068)..(1068): a, c, g, or t
  modified_base (1070)..(1071): a, c, g, or t
  modified_base (1141)..(1141): a, c, g, or t
  modified_base (1160)..(1160): a, c, g, or t
  modified_base (1168)..(1168): a, c, g, or t
  modified_base (1172)..(1172): a, c, g, or t
  modified_base (1188)..(1188): a, c, g, or t
  modified_base (1214)..(1214): a, c, g, or t
  modified_base (1230)..(1230): a, c, g, or t
  modified_base (1244)..(1244): a, c, g, or t
  modified_base (1246)..(1248): a, c, g, or t
  modified_base (1250)..(1254): a, c, g, or t
  modified_base (1256)..(1256): a, c, g, or t
  modified_base (1258)..(1258): a, c, g, or t
  modified_base (1483)..(1484): a, c, g, or t
  modified_base (1891)..(1891): a, c, g, or t
  modified_base (2555)..(2555): a, c, g, or t
  modified_base (3040)..(3040): a, c, g, or t
  modified_base (3181)..(3181): a, c, g, or t
  modified_base (3595)..(3595): a, c, g, or t
  modified_base (3670)..(3670): a, c, g, or t
acagaatttacgcacccnngnnttnnnnggagcctagcggntntncccgcgtccaagatnggcggcagaagcagctggtgggaaatacagaagcacagtcagcaaaagcaaagacccctcggggctgctcatctctgtgatcaggactctgtctactagtgacgatgtcgaagacagggaaaatgaaaagggtcgccttgaagaagcctacgagaaatgtgaccgtgacctggatgaattgattgtacagcactacacagaattgacgacagccattcgcacataccagagcatcacagagcgcatcactaactcccgaaataaaataaagcaggtaaaagagaacctgctttcatgcaagatgctgctgcactgcaaacgggatgagcttcggaaactgtggattgaaggaattgagcataagcatgtcctgaacttgttggatgaaattgagaatatcaagcaagtgcctcaaaagctggaacagtgcatggccagcaagcactatctcagtgccactgacatgttggtgtcagcagttgagtctntgnnggnccccctgctccaggtggaaggactgagtgaccttcgactagagcttcacagcaagaagatgaaccttcacttggttctcatagatgaactacaccggcacctgtacatcaaatcgactagccgagttgtgcagcgtaacaaggaaaaagggaaaatcagctccctcgtgaaagatgcttctgttcctctgattgatgttacaaacctccctactcctcgaaaattccttgatacctctcactattctactgctggaagctcaagtgtgagggagataaatctgcaggacatcaaggaagatttagaattggatccagaggaaaacagcaccctgtttatgggtatcctcattaagggcttggcgaaactgaagaagatcccagaaacagttaaggcaatcatagagcgcttggagcaggagttgaagcaaattgtgaagaggtctacaacccaggtggcagacagtggctatcagcggggggagaacgttactgtggagaaccaaccaaggtngnntctagaactgctggagttactgtttgacaagtttaatgctgtagccgctgcacactctgtggtcctgggnatacctgcaggacactgtnagtgactnccantgactcagcaggaagntatcaaactgtatgatatggcagatntatgggtgaagatccnagatgttctacagntnnnannnnntnantacttggatatgaaaaatactcgtacggcctctgaaccatcagctcaactaagctatgccagcactggacgagagtttgcagccttttttgccaagaagaaacctcaaaggccaaaaaattctcttttcaagttcgaatcgtcctcccatgccatcagtatgagcgcctatctgcgagaacagagaagggagctctatagtcggagtggagaactgcaagggggnnctgatgacaacttaattgaaggtggaggaacaaaatttgtctgcaaacctggagccagaaacattaccgtcatattccacccattactaagatttattcaggagattgagcatgctctgggtcttggcccagccaaacagtgtcctcttcgagagtttctcaccgtgtacatcaaaaacatctttctcaatcaagtcttggctgagatcaacaaggagattgaaggagtcactaaaacatctgaccctttgaagattctggccaacgcagacaccatgaaggtgctgggagtgcagcggcctctcctacagagcacaatcattgtggagaagacagttcaagacctcctgaacctgatgcatgacttgagtgcatattcagatcaattcctcaacatggtgtgcgtnaagctccaggagtacaaggacacctgcactgcagcttacaggggtattgtccagtcagaagaaaaacttgtcatcagtgcatcctgggcaaaagatgatgatatcagcagactcttgaaatctctaccaaactggatgaatatggctcaacccaaacagctgaggccaaaaagagaggaggaagaagatttcataagggcagcttttggcaaggagtctgaagttcttattgggaacctgggtgataaattaatccctccacaagacatccttcgtgacgtcagtgacctcaaagccttggccaacatgcatgaaagcctggaatggttggcaagtcgaacaaagtcagctttctccaatctttctacatcccagatgctttctcctgctcaagacagccacacgaacacggatctccccccagtgtcagagcagatcatgcagactctcagtgaacttgccaaatcgttccaggatatggctgaccgctgcttgcttgtcttacatctggaagtgagggttcactgtttccactatcttatccctcttgcaaaggaggggaactatgccattgtggctaatgtggaaagtatggattatgaccccctggtggtcaagctcaacaaagatatcagcgccattgaagaggccatgagcgccagcnttcagcagcacaagttccagtatatcttcgaaggcctgggccacctgatctcctgcatcctcattaatggtgcccagtacttcaggcgcatcagtgagtctggcatcaagaaaatgtgtaggaacatttttgttcttcagcagaatttgaccaacatcaccatgtcgcgggaggcagacctggactttgcaaggcagtactacgagatgctttacaacacagctgacgagctcctgaacctggtggtggaccagggtgtgaagtacacggagctggagtacatccacgctctgaccctgctgcaccgcagccaaactggggtgggggaactgaccacccagaacacgaggctgcagaggctcaaagagatcatctgcgagcaggctgccatcaagcaagccaccaaggacaagaagataactaccgtttagcagggcgtactgcggttggtgacgggggtcccctcagtcacactcacttttttnccttggtatgttattgagtatattctgagcttagttttctctacagtgatactttagtggagaggaggtgtaaggattctttctctctggttttggcttttcatataaatgctaaaggaaggcgacagtacagagtgtttnggttgaacaactactttaatgcagtcaaatctaacgggactagggtgggatagggaggaaggtggtatcaaattgttggactctgaaaaacaagtggatggattactaatatttgatttattactcaatatatatataattccagccttggaaagtaggaaagtaggctgctacctaacttttagtcccttccaaaaccatttagtagggttctattacataaacagtagggtttttcctctcctgaccttatccgtttacagttcaatgaaataagtgtatgtgcattgctgtctgtctctattgccaaaatcaaataaatggcttctcagctgctgtttacaacaaacttccctaaccaaaacagaacctctaatttagggctaggaatagaagtcttttgatcccagtccntgggacagttttgtatgctgtatcttgtacacaggttgtaggttggtttattgccattttgttttatttctgctntataaaaaccaagagccagacaattagacaactatggaggaatgaaaggcaattcaaacatctgcttgattcccgccccgccacccctaatttctgagagaataatggttagagaacattgcatctcacttgaaacatcctttgggggtaaatgattcttaggtgctcacttggtctgagctcagctgaatgcagggaagatgggacagagtgacatttctcctctgtgcggcctccagctgagcctgtctctgaattgttccctcccccgcaatgtgggcacttaccatgttcctggcacactggacctcaccatgtcccccggtcaccagtcctcttgctgcccatggttcataggtcatagaaggcagcaatgcactgactgggccacatcttgaaaactcgtggaaagggaaaggggaggagatgggactttgaccacacacagtgatgcctcacaccctgaaggtgggggattttgtacctgtttgtacaactttggtcttgatgggaaaaatggagaattaaaaagtgttttgagaagcttaaaaaaaaaaaaaaaaaaaaaaaaaaaa

SEQ ID NO: 371 - DNA, 2386 bp, Homo sapiens
  modified_base (42)..(42): a, c, g, or t
  modified_base (578)..(578): a, c, g, or t
  modified_base (852)..(852): a, c, g, or t
  modified_base (952)..(952): a, c, g, or t
  modified_base (961)..(961): a, c, g, or t
  modified_base (981)..(982): a, c, g, or t
  modified_base (1477)..(1478): a, c, g, or t
  modified_base (1905)..(1905): a, c, g, or t
  modified_base (1920)..(1920): a, c, g, or t
  modified_base (1944)..(1944): a, c, g, or t
  modified_base (1952)..(1952): a, c, g, or t
  modified_base (2091)..(2091): a, c, g, or t
tttttttttttttttttttttttttttttttttttttttttnttcattcaagaagtatttattgataggtgctaggcaagatacaaagatgactcagacacagatcctgcccataaggagcttacagtctaataggggagagagaacacatacatggaatacatggtcagaactatgtttcagtaagatgaatctaacattgtgtataaagtaggctggagtaagaggttaagtgaagctgagagactactgaaattacataggtgaggaagaaagacgggaaagacttgaggtagaactgacaggacttagctgaagactggatgtggggaataacaaaaatggaagcagatgactcagactttagcatggatgatgtcatgaactgaaagaaggaacaagtttttgcaaagaaatgaaaatttcatataaaattcttctgcatagaaacaaactgtctgggatatactaggcacaatcaggaagaaatggctagttacccagaccaatggaagcacctcaaactggccagtgacttcctcccccttatatatccatccccccaaatttcccaacanttttctccactgaaatggtatagtgcctaaaatttattaaattcaaggtctatctccagacatggcctcccttgggaatgaaaacagaaatatattaagttattcaactcagtaagtttcatctaaagactctagttatgagtcactgtaccttctggtggaatacagagatgaactccctagtccttatcttctaggagcttacagtctagtaaagtagtaaaacagataatgtaattctaattctagactgaaggggtaagttatgaactangagaaagacaaagtgctctagaacagtttcagaaatgaaggttggaacaggacctcaaacaagagggaaaatgtggaaagtagatgagaatggatttgtntcctcactnccaaattctggacagatcanncccaaaacggggctactccccattcctgttgaaattttttcttaggaaaaaatatagctcttgtactgatcttttaaaaaattacttacatggcaagagatcagaggaaaggggggattgtagatctcagtggaccttcggggaagacagaaggcacttgaagccaaggaatcacaatgcctggcttatcgggaggaccctcagtgttttagcaaggctggagcatcacttccatgaagagtgggagaaataactcaaaagtaatattaagaccttgatataaacatggcattgccaggcactaaacagggtacacgcctaagaccaaattgctgccccctaggagcttacagttacaacaatacaaggtggaaaaagcaccacaatgtacagaatgcaaaatgctgaagtatttaggagaaattacagctgagtttcagctattaacacattaggatacccaatagctttctgacagctagtagtaaacccatnnctgaggggagcacaagttaatgtccttagacaacaagccctggtagagctgggccattaaagacagttctaagaaaattgagaaaacaggggtatgaaaactacagaagcaactgggtgaacatacaaaaagtgataccttccctttttctcctgacaaactttaacagggctgcccttcctacagtgaatctaaactgatgatcaccatattacttctaaaagcagatttgggactctactaaccaattctctctgatcctttgtaaaatgaaggggttgtacaagtcacttcctagtcctttccagcactaacattctatgattcaaagaattctgagagtttctctgttccttttggtaataaccaaaatagaagaaaaaaatttaagtctgatgcttctcactcaaaaatataattattttcnatataaatcacaaantgatccctatgctatcagctaaanttttactntccaccctatccttcttcaaaatccatgaattttttaaaaccacatgtcctacaagctaccttagcatgcaccaaatgatttttcaaaaagttttctcatctcctactcccttataccaacttcttggtataatgtcanttaaagggccaaatcagtgtacatccaatcttcataacaaaattttaaaatttaggagaacaactgacatcaaagcatgaggacagtgagtaaccgaagtggtttttgttgttttctaattttttgttttttagagacagggtctcactctgtcacccaggttagagtgcagtggtatgatcataactcactgcagcctccaactcctgggctcaagcaatctcctgcctcagcctcctgagagacggagactataggaatgcgccaccacatctggctcacttttcaattatct

SEQ ID NO: 372 - DNA, 3866 bp, Homo sapiens
  modified_base (8)..(8): a, c, g, or t
  modified_base (71)..(71): a, c, g, or t
  modified_base (109)..(109): a, c, g, or t
  modified_base (945)..(945): a, c, g, or t
  modified_base (952)..(953): a, c, g, or t
  modified_base (1047)..(1047): a, c, g, or t
  modified_base (1372)..(1372): a, c, g, or t
  modified_base (1415)..(1415): a, c, g, or t
  modified_base (1866)..(1866): a, c, g, or t
  modified_base (1984)..(1984): a, c, g, or t
  modified_base (2225)..(2225): a, c, g, or t
  modified_base (2295)..(2295): a, c, g, or t
  modified_base (2520)..(2520): a, c, g, or t
  modified_base (3090)..(3090): a, c, g, or t
  modified_base (3092)..(3099): a, c, g, or t
  modified_base (3225)..(3225): a, c, g, or t
gcgatctntagagaacagcctggatgaagaagtgaccatcgagatcgttctctccagctctggggacgagnactcccagcatggcccgtactgcacagaagagctgggnagccccacagagaagcagcgcagcctccccgcctcccaccggagcagcaccgaggccggaggcgaggtgcagacctccaagaagtcctacgtgtgtccgaactgtgggaaaatcttccgctggagggtcaacttcatccggcatctgcggagccgcagggagcaggagaagccgcacgagtgctcggtgtgcggggagctgttcagcgacagcgaggacctggatgggcacctagagagccacgaggcccagaagccttaccggtgtggtgcctgcgggaagagcttccgcctgaactcccacctgctctcccaccggcggatacacctgcagccggacagactccagccggtggagaagagagagcaggcggcatccgaggacgcggacaagggtcccaaagagccgctggaaaacggcaaggccaaactgagcttccagtgctgtgagtgtgggaaggccttccagcggcacgaccacctggctcggcaccgcagccactttcacctgaaggacaaagcccggcccttccagtgccggtactgcgtcaagagcttcacgcagaactatgacctcctccgccacgagcgcctgcacatgaagcgccgttccaagcaggctctgaactcctactgagcctctccgcctggggcggcctcaccctggctggtgctgccccctcaccttggtactgatcagcgcccccacccaggacataccttccccaggatagagagcacacctccctcctgtccttgctctcaggtagtgagcgttcgggtggtgccatgggagcactctccctcccccaggtaatgaaagagtggccaagtgantgttctnnttctgctgtgccaaaaaacgggggggatgtgccatcaccaggttggacatgccaggtgttctgcgtcttagagacccttggcccatgctccccnaagctcggggagtaaaactgggctatcccccgtcagggcggcaccctggtcaccagccaaacctcagtatactccctcccctccttccctgtctgaacgctaggatctgctcctgaagctccaggatgcctgcacttccactgagaagctgctggcggatgttggactagaggaaagaagaaggcagggtgggactgatgggctcagtggggagcagggccaggcacactgagccagacatgtcatgtctgagccccagattcgtggccatcaggtaggcaggagcaccccgcagatccaagatgatcaggcagcccttttgggntggcctctgtggcaggggtctgcagagctccttcttgaggttnggaaacagtcgtcatacctgttgattttcctgggggccaatcactagggatctggagctcaccaaaaacaaagcttacattttaatttgtgttgcacacctaccccataatgtctttataccccaaagatccttggtaaatgcttgtgggttggaagcggagttgtcatcgtttaaaaggcacttaagtcccttcttccaatctgtcctgtctaggaatgtggagctctgcccccagtgaggggttctcctgtctgggtgagccaagctccagaacagaaccttgcctgacaacacacttgatagatacattagcttggagtgctggtgtgtccaaacactggctggcttagaacaacaggagtgtattccctgacagttctgggaggtgcacgtccaagatcagggtgtcctcagagttggtgccttccgagagctgtgagggagaagcngcttcatgcctttgctggcagttgccattccttggtgtgtggaagcgtcacccagtctctgccttcatctccacatggcactcttgctgtgtgcgtgtctgtctccaaacctcccttngtttaaggacaccagtcatatcggattagagcccatcccaccgactccagtataacctcatctgtatccgcagcaaccgtttaccaataaggtcacattctgaggtactagaggttgggacttcaacatcggaatttgaaagggacagcattcagcccatgactccagataaacgtgaggtatgctatatcattcctaatttacagatgagtcaatacaaacttgagtgagcttgctcacnaattccatcaaaggcagggttcagacccaagtttcagcatttagggcaggtgtcctctgcatggaagaancatactcaatagccgtaaacgctgacaaattccccttcctccctgccttctgatgggggctgggcaggccagctggagctgtgtctcctgctgggattccggactgagagtgacagcaggtagtgaaacctcaagcaatttaaaacatggtattgttcctggaagactggttatgttggctagggtcagcaagagagggcatcaaggctgtagtctagcagtganttaatctgcaagtcaaaccagacgggtattttgtattattcatatgtcacatcctaccaacagacagtaagtcaggcaaggctcctggtgctccttgtcactcacgtaattttcacatcaggaaaactctgggctgggtgcagtggctcacacctgtaatcctagcactttgggaaaccaaggtgggtggattgcctagctcagtgacaccagcctgggccacatggcaaaaccccgtctgtaccaaaaatgcaaaaaattagctgggtgtggtgttgacgtttgcggtcccagctactctggaggctgaggtgggaggattgcttgagtctgggaggcagaagttgcagtaagccgagatcatgccactgcacaagctaggtgacagaatgagactctgtctcaaaaataattaaaaagcctctgccccaaactcgttaaaagattttataaccacaactgctgtttctgtgtagatgcatctgcatgcccaggagcagtaaatgcaataaaatcatttggttatactttgaacacaaaataaacggttgaggcttttactttctaaanannnnnnnncttgtatcaacatagctggaaaagggagaaatccgatttttaaggccaagggaggggaaaattccaagtagaagccaggctctctgtacacgtttaccccacctacctgtgtgctcctacctgtgntgaggattctctctgtagctctaaggtcttgggaaggttattcaccttcctgcttcagacgtctgactcaagagaagaacactgttctacttaccagagtgtttttctgtgtaaaaccacatcatgaaggagaaagcgacaaagggaatgtgaggggctggaagccacagggaggctgtctcttgagtccccaccactgatccagagccaaccaaggcacctcaggaaatggaaggccacattgcctctggatttggaaatcctcctgggtaatgtaactgaaacccaggttgatgccatgcagcaggagcagcagggggaacgtgctctcaggagaggtcggccaaccctccagcccaacacccttcaccacagtggtggaggaggctgcacccaggagatctttgtctcccttttggccactgatacctttggccttatctgacaacagctacccctcgatccttccctcccaccccaggggctgggcagctggctggagctttgtgtccaccttgctctggaggttgagacccccatctgagcaacatcctctctctttgttcctctgatcccttggcatcgtcacaaacccacaggtgcataataaaaacttgctgagtcaaaaaaaaaaaaaaaaa

SEQ ID NO: 373 - DNA, 3450 bp, Homo sapiens
  modified_base (15)..(15): a, c, g, or t
  modified_base (34)..(35): a, c, g, or t
  modified_base (134)..(136): a, c, g, or t
  modified_base (1018)..(1018): a, c, g, or t
  modified_base (1079)..(1079): a, c, g, or t
  modified_base (1357)..(1357): a, c, g, or t
  modified_base (1424)..(1424): a, c, g, or t
  modified_base (1448)..(1448): a, c, g, or t
  modified_base (1838)..(1840): a, c, g, or t
  modified_base (1842)..(1848): a, c, g, or t
  modified_base (2308)..(2308): a, c, g, or t
  modified_base (2325)..(2325): a, c, g, or t
  modified_base (2332)..(2332): a, c, g, or t
  modified_base (2337)..(2337): a, c, g, or t
  modified_base (2347)..(2347): a, c, g, or t
  modified_base (2441)..(2441): a, c, g, or t
  modified_base (2443)..(2443): a, c, g, or t
  modified_base (2452)..(2452): a, c, g, or t
  modified_base (2459)..(2459): a, c, g, or t
  modified_base (2469)..(2469): a, c, g, or t
  modified_base (2502)..(2502): a, c, g, or t
  modified_base (2526)..(2526): a, c, g, or t
  modified_base (2538)..(2538): a, c, g, or t
  modified_base (2824)..(2824): a, c, g, or t
  modified_base (2859)..(2859): a, c, g, or t
  modified_base (2871)..(2871): a, c, g, or t
  modified_base (2873)..(2873): a, c, g, or t
  modified_base (2881)..(2881): a, c, g, or t
  modified_base (2911)..(2911): a, c, g, or t
  modified_base (2942)..(2942): a, c, g, or t
gctcgactttttctnttttttttttttttttttnnttgatattgtgatttttaagttttattgattaaattcaaacttttttatcatttacacaaagaaactgtgacagactctgagaggactaaaaggcatcnnnttaaattttaacatgcatttattaaatttatatgcagatgactacactactgcaattacagaaatgagtaagaacatactctcaagatcttacagtcattggttggggtgaaagtatttcttctgtcttcatgaaaaattaaaaagatagaaaatcttgaagtattttgctaccttaaaacaactacccaccctacatttgtactaaaataggcttttgcttgttttaaaagcaattctagatgaggttatatttttacaatactgtatctcatctcaaataaatttatacattctttaccctgtctaaacttgcatgcaaaataagaaccagcaagccttcaaacttcaatcacagtattccataggctatattttaagtctattgcattagttgaaatttattttgcagagtatgttaacaaacatattctaacacttaaaaaatcattacaattttttctgtttttgtcttctaaattactctgagcagtgaattactggagggaagatacccatgtctaaaatttgtgtctggtgccagtctcagatttctgccaaacaccagtaggtattcaaaagtgtggtccctttaaaacagcaggccggatatcacctttctgtcttcaaagattcaaaccagactcccaatctgggatttctctacagagggttggctgcttcccagttaatgtgagttttgcaaagtttgcatttcatgaaaacagtgttgtgtaaacatatattgtgtcactttacctactatttactaaaatcagagagtttagcctttgaaatttatggttctctggagctatcataaatcaatcagtcatacgaatggactagctgtagactcaggatatcaataaaactaggcagntgaaatttgcctataattatactatatttagattaatagttatcaaaaacatttttccccnaaaaaatacctcaagggtaaaacagaatggtaaagtttttttcaggataatgaattttcaaacatttccaagaccataaccagccattttaagtactgtaaactctgttatatttcatttggataagtatctaataagcaattattacatatcctctcatttaaattaccactgaaaactagaaataatctttatttaatacgactgttttaacaccatatggaacgggaaataactaaatgaaaattgttcacgtaaatgtgatgggaatgggcggnctgcgggagcagtatttcttgacatgtggcatgtcactcaggaaagtaaaaggcccatcatatccanaatgccagcttggatattcccttngccacccacttgacgaacagacataccacatggcattaaatgctgcaacctttcctaaaaatgccacttggattggtccgctgtggtgagtatataagaactcttggtctgtctcttgagtctgtgagttcaaagggaagaatctagtaaataacaccggctaaattttgccctcagatgtttggcataaatgatttgtgaggatattggaacctttggctgttttcacaccaatgaaataaattatgctacttgaaaaaaattctacagaacataatgctacacagtcacagtcgactttttgcaaaagtaccagagaatatcttttagaaacagtgcttataaagccccatatactccttagatatttcccaaggatttcttctcttnnntnnnnnnnaaacaatcttaatattttatttattcttcataaatacaatgtatataatataaaacactttgtgcacatgtttccaacaatttcattttctatgcatctttacataaggtagtagctaataactctttctgtggacacgtattttccagttttctaaggtttatgtgttcaagcattgtaaaaacatatttaaaaattgaattaccagtaaaaatattgaatgtacaggtcattatgctcccacaaatacaaaatacattgaaaaattatatcaacagataattacatatgaaatatgaggcatatattttcttctattatttattttctccctaaagagttctaattgattaaatctcaagagacaaaatgtaattttataaaacaactgtattgttcagatttaggagacaacctaagaagatgattctgagtaggtaggatttttgctattactgtnatgtgaaaaagactgcncaattanaatgnacagattgtnacatatctccctaacaagaggggcgaactgatactacaagcagccagaacaacataattagaatagaattccaaggttatattaatagagtaantnaagttaatntaaaacnaagatcaacntgagcttctatttacaccagttcagacagcccnaagaggaaaagaactctattttangagacatatgtnactctttgagcttctgtcatccaggtgccatttctgatgcagcacatgtgcactgaacagttggcaaagaaggaaaaagattatggtagatgtatgtgcagatagtctctctaatgatgtaaaatacgtccagaaagaaagcagggctttgttgtaaaataaaaaatttcccatgactttttgttctttctgaatgtgatttgagcatgtttctgtaaataagaatatatactaacttatgatgtatatagaacaaaaatagacttactcatcaggaagtgatggnattatacacataaattggcaatgacatttgaaaantttaggatctgntnccatttcntctaaatgtaccatgtatagggtggctgtnaaagcagaaagatatataaaagtatccagtngcacatactatactgcattgctaggtaaggttcttttcctgacatcctatgcaactatcaaaaatcatatgtctgcaaactgaaaatattagcagaaagaattaaagatgttacagtttcagtattgaaagttttggtcccaaaaggtgctttcgtaaagttatttctctttcatgcattgattgttgcttagctaatcttcatcttggtccagatcagggtcaacatccgtggtgagtctttatgcctattgctgttttctttgcttctgcttttaatttggttgctcgtaaaataggtttagtttttttataatcctgtttaccaatttgttttctgtactgatcaacaggaagttttatagtagcagcatcttttctacccatctttgatctccaaaatgcctcagctctgccaaggcaagggccgacaaacttcgtgtcctgtgggaaatgttgctgtccacggttctgtcactcaggggcaggggcgggacaagccagccgca

SEQ ID NO: 374 - DNA, 4654 bp, Homo sapiens
  modified_base (310)..(310): a, c, g, or t
  modified_base (343)..(343): a, c, g, or t
  modified_base (512)..(512): a, c, g, or t
  modified_base (528)..(528): a, c, g, or t
  modified_base (664)..(664): a, c, g, or t
  modified_base (1491)..(1491): a, c, g, or t
  modified_base (1493)..(1493): a, c, g, or t
  modified_base (1612)..(1612): a, c, g, or t
  modified_base (1650)..(1650): a, c, g, or t
  modified_base (1950)..(1950): a, c, g, or t
  modified_base (2035)..(2035): a, c, g, or t
  modified_base (2063)..(2063): a, c, g, or t
  modified_base (2107)..(2107): a, c, g, or t
  modified_base (2114)..(2114): a, c, g, or t
  modified_base (2245)..(2245): a, c, g, or t
  modified_base (2257)..(2257): a, c, g, or t
  modified_base (2263)..(2263): a, c, g, or t
  modified_base (2265)..(2265): a, c, g, or t
  modified_base (2269)..(2269): a, c, g, or t
  modified_base (2274)..(2274): a, c, g, or t
  modified_base (2292)..(2292): a, c, g, or t
  modified_base (2297)..(2297): a, c, g, or t
  modified_base (2299)..(2299): a, c, g, or t
  modified_base (2302)..(2302): a, c, g, or t
  modified_base (2309)..(2309): a, c, g, or t
  modified_base (2855)..(2855): a, c, g, or t
  modified_base (3119)..(3119): a, c, g, or t
  modified_base (3365)..(3365): a, c, g, or t
  modified_base (3480)..(3480): a, c, g, or t
  modified_base (3501)..(3501): a, c, g, or t
  modified_base (3922)..(3922): a, c, g, or t
  modified_base (3958)..(3958): a, c, g, or t
  modified_base (3985)..(3985): a, c, g, or t
  modified_base (4133)..(4141): a, c, g, or t
  modified_base (4624)..(4624): a, c, g, or t
tttgctttatttttttccttttctcttttttttttttttttctctttcctttttttaaatttaaaccattgagacttcagaagagcaggacacaatgctgtggacaggcaccaatttctttaaagaaattcaatgtgggcaaggcatatgtgtaaatttcacttttactttttataaggggttagggagctatttttggttttgtccttcactttccctctgtcttccttctttatacttttctcagttctacttatgacacctcacttccctagagaaggcctgcctccccatagggaatctgggggtntcttctggaacggggcgtgaggacacaaggagncctctgggccacgcctccctaccagatgcaggaactcctggactccttggtgggctggccctggctagcccttgggcctcggagatgatcagaggtgaagaaccgcctggaagaggaaggccagggtttggccaggagaactaagaaggtctcaactccaggctttgtngtgtttaagctattgngagccccaggccacaccaggacttgcagtggtgggaatccattcctcttctgccctgtgttgcagggaactaggaggtaagggtggagggcgaccatctcgctcttgctggcggtggagcagccatccctgccttnctgttgggaaaaactgttgtgccaaactcttgtgtggaacacagctgggtcttcagcaggcatctgtcactgccgtgaggtcagcgcttctcacctaactgcctcctggattgtcatcttcccagatgtgtcccatagtgtccaggtgtcacagagacggcctgaggccctaagatctggttgtgactttgccatgataacagggtgtcctgaactggctgccgttgtcgtgttctcacagtgaagggcgtgccctgtgtgccggggtccatggtgtcatatgcagtgacacacactgtcaagcgccatttccctcacccctggagacttactgttaggtgcctgccctcagtatagacgtatccaatgggaaaacagcggacctgcccagagcagggaggtgtcgtggaactgggtagaccccctgcagcgttaggggcccatttgtgggctcgccaccttcaggcttccccagccatgacacttcagccccgccacccatgcctgtctgctgcagccatccttgcactctccagcgacactctcgcacctccctaggggaagcttccctccccctgggctgctgctctgagcccgtctgttctccccctgcaagaaggggcaatgctcttgtgttgtccctctgtctggacgcgcctggccactccgaaggcttttcaccccattatggccaaatagtatagggccactggggagggggaagggaatcattttgtgttcatttttgttttctgtttcacctaaaccagcataggattgataggggagacggttggcgggcatttccgtttctatgtgactatgtnancaaggcagcaggggcttttacctgctaggcggcagtcctttggccctgagaatttgggagagaacagtgcatcaggccaggctcagcaatatgtttgctcacattctttcagccttctntcacccccctcaacaccaaactttcttccttgtgagcngaaggttggctgctgttagcaggatcccacagtgataaccaggcccttcccttcctaagccaaaacccattgtgactgcctgtctctcctgtctctgacttctcaggcagcctcctgagtgcactgagttgtatccgagagggtgggaacagcagcatcccctaattgcagtacacggttccttttccgcccgccaccctgcctttccttgggggcagctgtctctctgtacatgagcaaatgggcaaaaacagtccccaaacccagcacccccctctccctggctgcagcccacactgnaacatccctagtgaggctccagcctaatgagccccttattttctttttcttccctccccaggtctcgtagctctaactaaaaagntcttggagccatcgtgctccccctttgntatttttcttgctatcagagtagcaagaaacagcacccctgtangtgacangtgggcagcctggtaggggtcgccagcctccatgccccctcatcttccagttcttgcttagtggcacgacctctttccatagcataaatgcaggccagcgttttagccccaagtgcctgcccttgcttctnacccctcccctnctttcncnaaanacttncccacctcaggcactcancgggncnccnccgtggntgagagaactggccgtggctcagccccgggtagcacctgtagtttcagtgccactctccactgtccccttgtggaccagcttccactcactgtcacgtcccccctcctgcgtcttcactgggtctcaggctgccagcagctctctggtgcatcgtctcaacaccaccaagtttgtaggacctgcccaagttctagtagtattcaaaacttcaaacggcagtcatttgttctcctcggctctgtggcaaggatagccctttggagggggactcttgacctcggctgttagggatctgaacttggttttcccgtcagaagaatcagcaggacagatcgtagtgccttattccattgtcctcccctggccaggcctcctggctcagctggaagtgcatggcttctttctccctatctgtgtcctctgtcacttgctctttcactctctctctcattcccagagagccacgggggagggatcaccctcacccccaacaccctcttcctgagggctgtagccaggtccgcatctccccaccaccaccaggncactcactcgcagctatagcccaggacagaaaaactgtgctttggacaggtgcacactctctgcctcttacctctagccaggaggatgcctcagtctgttcattcgagactggccccgtctgaaccttctctgggcactggggactaaggttgcaggccttagcctcgtctcgtcccagaggcattgggtcaggagaatgggaatttttttcctcccacctggacatagtttgcccctgtggctgcctttctgagggagtatantaaatgtttacttaagaaacaccctgtttacagccagaggagaaacacccaacactgagtggagatttgactctggacagggcctggcctccttagtggcactgccggggggccccagagcgaatgagggcagagatgcccggggcaggggcaaacgccctccgctccctctgctcccaaccctgtggtgctaggaccactccccgccttccctacggcctcctcgccctgcacattccccacctncacattcccctcctccaagatctcagctccttaacatatcagttgtctcctagcctagaaaaccagtgtttggagcaataagatgattatttttgcttgaatctttttctaaganaaggaaaagagctggcattgngggaattttctttttatgctgttagctgtttaccttcttagaagacatcctaataggatggatgtctgggttttagccttggggtatcttttggaaacttagaaaagcaggagtcaggctgccaccccctaaggagggaccctaacgttctgcccttgcctggttccatatggctccttccagccctgcccaccaagtgcagctcccactttccatcctgcccatacgcccctcttcccccgacatctgggggcgctggtggcacttactctaggttggtctcagactatccctccccttggctggttttccctcctaggcctgtctggcagcccccagacagacgtagctcctgggagtctcggccctggcaaccttggaagagccaagctgacattgtttagctcttcaggccactggnttttggaggcagaagtccagagatactggctctgcnaagctgtcgtactgggctgtggcacanccttcgagacaacacgggtgtatctctgatcctgccctacctaggcttcaaggggcttctgtctggagaaatgccctcaaagggtaaccagtaggtgtggcattgaattggccagtgttagcatctacagccatcaccgagatgagtnnnnnnnnnttgcctgcccgagggccccctaaggttatagacggtatcagcagggaggccgtcccgctggttttctaggagagcccacaggaggaagggagcctcttcaggggcactggaatcttttgtgccaggggcttcttttcatcagagccggggagtacattgcagtgacttcttaaacatttgtgtgggacagacgagcgtgagggaggttttaagccaggcacaaagttagtttccaatactagttaataaatctatttttcttcatttcctttttttgcacagaagctggtaatctaggacctacgtgtgaacaactttatatgaatattttttgtacttggtttacttgggttggtatgatacattatatttaagttccttgaacactgtggatcccctaatgtgtatgaatgactgaggctttgtaaattaagggacgtttgtgtgaataaagttatttgatggggtcaaagaagccatatntgatttgaaaaaaaaaaaaaaaaaaaaaaa

SEQ ID NO: 375 - DNA, 1692 bp, Homo sapiens
  modified_base (4)..(7): a, c, g, or t
  modified_base (29)..(32): a, c, g, or t
  modified_base (687)..(687): a, c, g, or t
  modified_base (1138)..(1138): a, c, g, or t
  modified_base (1158)..(1158): a, c, g, or t
  modified_base (1172)..(1172): a, c, g, or t
  modified_base (1573)..(1573): a, c, g, or t
  modified_base (1681)..(1681): a, c, g, or t
ggtnnnntttttttttttttttttttttnnnntttcagctaaaacgtttatttctcactcaaaacttatttcccctcaaccctatacccaaagaagaaataaaatcacagatacataacagaagtatttgaggtaccctctcatatatgcaaacaaatgcagactaggcctcaggcagagactaaaggacatctcttggggtgtcctgaagtgatttggacccctgagggcagacacctaagtaggaatcccagtgggaagcaaagccataaggaagcccaggattccttgtgatcaggaagtgggccaggaaggtctgttccagctcacatctcatctgcatgcagcacggaccggatgcgcccactgggtcttggcttccctcccatcttctcaagcagtgtccttgttgagccatttgcatccttggctccaggtggctccctcagtctggactctaccacttgggtctccagattttctgttacgtccttgtgggtcaggatatttctggaagtcactccgtgaggctggtaatcctcagacccagcttctggtcgactctggaatggactgaagctgggcaggatgatgagagccagggaaaaaagaagaatcaaaacacaagtgctggtctgggcagctttgttggaagtttgagcaattagcgtctgcagctggcggagntgagctaccaaggagatgttgtgcctctccagctcctggacttttttctgtaattcttggttctgtgcagaacaggctgccaccctgctctccagcccatcaatgtactccttcttccgccgccgactgtcctgagctgactgcttgttacggattttcctcctgaccttcttgaggaccctctcctctgccttggtgaggggcaggtgagagggcagggaaaccccttcctgccccagcagacgcttctcctcatcggtcaggaacagggtttgacagggcagcagggttgtacagggcactggggctacggtgcctgctctgggcaggatgtgggcatgagcatcaaagggcagctcactgaccatgcaggaatcaggcaccataaatgctgggctccactgatctagctggatggagataaggcctacatttggcccagtttcccccntgcatcctctccagggcccntgcctcatagacancctcatagagcataggagaactggttgccctgggggcagggggactgtctggatggcaggagtcctcagagatgccactgtcactgccaggagatgcttctgagcagtacacctcattgggatcaatgaaaagcttcaagaaatcttcaggctcactctcttgaaggcccggaacctctggaggggggcagtggagtcccagctccaggacggatcctgtcgagaagatatcctctgggggctccagccacgcgtccagcaggtcagggattccgagatccatgcttcttgccaggagccacggtagggccgctgtatctgggagtaggggactaagagtctgagggtccacaaacggaatttaagaagtaggtagccgcgccctttctgctgcagttttntcttagctatagtaaatcttcctgagggtttggtgtctcctagctgaagaacagaaaaggctgtgactggagcacaggactcctgaatgcctgttctgtagccctcgnttttgcaagag

SEQ ID NO: 376 - DNA, 2061 bp, Homo sapiens
  modified_base (696)..(696): a, c, g, or t
  modified_base (798)..(798): a, c, g, or t
  modified_base (801)..(801): a, c, g, or t
  modified_base (821)..(821): a, c, g, or t
  modified_base (882)..(882): a, c, g, or t
  modified_base (1080)..(1080): a, c, g, or t
  modified_base (1368)..(1368): a, c, g, or t
  modified_base (1372)..(1372): a, c, g, or t
  modified_base (1376)..(1376): a, c, g, or t
  modified_base (1380)..(1380): a, c, g, or t
  modified_base (1412)..(1413): a, c, g, or t
  modified_base (1426)..(1427): a, c, g, or t
  modified_base (1460)..(1460): a, c, g, or t
  modified_base (1465)..(1465): a, c, g, or t
  modified_base (1467)..(1467): a, c, g, or t
  modified_base (1481)..(1481): a, c, g, or t
  modified_base (1491)..(1491): a, c, g, or t
  modified_base (1495)..(1495): a, c, g, or t
  modified_base (1509)..(1509): a, c, g, or t
  modified_base (1519)..(1519): a, c, g, or t
  modified_base (1558)..(1558): a, c, g, or t
  modified_base (1568)..(1568): a, c, g, or t
  modified_base (1612)..(1614): a, c, g, or t
  modified_base (1620)..(1621): a, c, g, or t
  modified_base (1625)..(1627): a, c, g, or t
  modified_base (1637)..(1637): a, c, g, or t
  modified_base (1648)..(1649): a, c, g, or t
  modified_base (1656)..(1656): a, c, g, or t
  modified_base (1831)..(1831): a, c, g, or t
  modified_base (1918)..(1918): a, c, g, or t
ttttttttttttttttttttcaaatggaagaggcttttatttgtaaagaaatgaacttacaactgatctacaatatattattgtaatataaacaatataaataaatgatcctgtaggcccactaatcttccatccagacccacatgaagcaatgttacaacaatattctatatgaaaatgtgcaggtaacaaaggtgcaattacaagcaagttaagcagcagagtataaggtgctttaatttaatagttaatgttgccatcaacaaacatttaaatgctcaatttacttcactgaatacagacacaacaaatatgaaaatctaaattcatacacatgctacttaatatgaaagtgctttctcttttttaaaaaaatacaccaaatggacactttttacatagatcaaatgtgctcttacaatgcaaaattaaccttcattttcaggttatacattttaaaactgtagctatcaacaccaatctaggaactctaatgctaagagtgctaaaaactatttcatttcttgtaaggaggactctaatacaatatccaatgtaaagaatacatctatatataatcttaacatgttttctgtaaagataaaaaatgttttctttccccttggtgatctttgttcatcctgggtggatcatcttttgaggttttaataatatgaaagtcctattttagaacantgggaggaaccaaaaggggaattaaaaaattggttaacgtgtgcttgaagcatccaaaaaacaccagtttatcacaacaattggtctttgctaaaattaacnaanttttaataagcaagacgacnaaaagtactaatttaaaaggcttgaaatgcctgccaccattgtcagtatccatccatccanccttcatttactacaagcacaatactactttgaggatagtttttggaacttattttgacttttttccctataggaaaaacaaagaccaagcttttgaaggagaggactgggaatctagtttaaatgtctacatccaaaattatatcatctttgcgcattcagttgactttttaaaatttaagaatacatatacaaaangtacttatggaatacatattttaacagcataacatatttgaagaattagttacactttaaaaattaaaacacttgaaaagtattttttaaaccagtaccatggaataactttttgaaacccagattatctggctacttagatgatagtcttcctgttttcaattagtttgaaagattctaatatagattctaacccaacagtttatatggatattttcctgctttaaaaagctgcaacaggctaggcgcagtggctcatgcctataatcccggcactttgggaggctnaggngggnggancacttgaggtcaggagttcgagtccagcctgnncaacatggtgaanncccatctctactaaaaatacaaaaaactggccnaggcntnagtggtgcatgccnagtaatcccnagcntacttgggaggccnaaggtggganaatctattgaacctgggaggtggaggttgcattgagccnaagatcacancgctgcactcaagcctgggtgacagtgagactctgtctcaaaannnacaaannaaannngctaaaacantgataaactanntttaatnagatattttcattctatatctttatggagaatgtcagtatcaactgatgttaacaagtaaagctttgtcaacaggaattacaatgtgattcacagatcccagaatgacaaggaagggaccttaacccaataaatgattctcccattcaatgtttaccccctagatacttaacaantcaagcatggaactgtttcatgtttacccgttctacatttaaaggatgcccttttactatatatgtgctttctagaatattactgantcttacatatctttaaaagttggatatttgtaatagcttaaagtacagtaacacttattttgtgtaatctttcttaatttaaaaacaaaaaataaatgaacaagtcagttccaatgatctcctttgagatttttcagttttag

SEQ ID NO: 377 - DNA, 756 bp, Homo sapiens
  modified_base (33)..(34): a, c, g, or t
  modified_base (37)..(40): a, c, g, or t
  modified_base (42)..(43): a, c, g, or t
  modified_base (166)..(166): a, c, g, or t
  modified_base (681)..(683): a, c, g, or t
  modified_base (685)..(686): a, c, g, or t
  modified_base (688)..(690): a, c, g, or t
  modified_base (692)..(695): a, c, g, or t
  modified_base (697)..(697): a, c, g, or t
  modified_base (699)..(705): a, c, g, or t
  modified_base (709)..(709): a, c, g, or t
  modified_base (711)..(711): a, c, g, or t
  modified_base (713)..(715): a, c, g, or t
tttttttttttttttgaaggaaataagaggagnnttnnnntnntacgttcattcgttatttatttgtgtgcgaccccggctccccgcagcctccacccctcccgcgtcccgctttcagaaggaacgcggccctcagctccctccgaagaggccccgggtcaggggntgcagccgggtccccgtgcgtcggcccagctcgtccagcaccgccttctccttctggaacatctgctgccactctgcctccgtgccgtgtgtgaatcccagcaagtgacagagtccgtgggtggccgtcacagtcaggacgtcattgtaatcttcattttctttacactgatggaagatatactccactcctaggaaaatgtctcccaaattgtagtcatctggaaaatcaggctggggaaattcacctgctttcagatgctcatgaaatggaaaagaaagcacatcggttgggacatttctatctctgtagattctattaatgtgctgaatattcttgttgtcaacacagatgatccccaggtcaaatttctgcactcctaaaatcctccttacaatctcgatcttactgcgaagtggcgctctcctgatggggatgactcgctgcagatttctaatcaccaaactcatttcaggaagaataaccagccctttaaaaatgtttgcaacggaacnnntnncnnnannnngnannnnnnncgangntnnntggaaggatgccgctggaatccggccagaagactccagcgg

SEQ ID NO: 378 - DNA, 2663 bp, Homo sapiens
  modified_base (155)..(155): a, c, g, or t
  modified_base (175)..(175): a, c, g, or t
  modified_base (186)..(186): a, c, g, or t
  modified_base (193)..(193): a, c, g, or t
  modified_base (224)..(224): a, c, g, or t
  modified_base (292)..(292): a, c, g, or t
  modified_base (309)..(309): a, c, g, or t
  modified_base (383)..(383): a, c, g, or t
  modified_base (858)..(858): a, c, g, or t
  modified_base (1484)..(1484): a, c, g, or t
  modified_base (1486)..(1486): a, c, g, or t
  modified_base (1488)..(1489): a, c, g, or t
  modified_base (1492)..(1492): a, c, g, or t
  modified_base (1496)..(1496): a, c, g, or t
  modified_base (1563)..(1563): a, c, g, or t
  modified_base (2261)..(2261): a, c, g, or t
  modified_base (2263)..(2266): a, c, g, or t
  modified_base (2268)..(2270): a, c, g, or t
  modified_base (2273)..(2273): a, c, g, or t
  modified_base (2275)..(2275): a, c, g, or t
  modified_base (2277)..(2278): a, c, g, or t
aaatatctgaaatacagaatacgaatttaataaaggaagcctaccttatgtaaattatgatgttgaaaatgacagtcaaccagagtagatgaagtgtccttatgaagaattattaaatagtagctggatggatctttagatggatgaccacctgnaccattccaggacaattttnggtcccatttngaggatngccatagttgcaagtccttaggatcttcctngttttaaaaaactatcaaagtaggttaaattaaaatctaatttaaattaggttaatttatattacatngtagatcattctttttncccccctctttcacttctaaatattttgctttctaaatactagccttctggttcacagtgaaataatttaattntcaatcagtagattgattccaagtggagaattcactgcttccctaaaatgcgtttttcttacctgtaatggtgaatatttacaaggatctggataaagagattttgatttttgaaatgccacaaaaccccttaaagtggtcaagtacctaaggtagtggctaaggcatgcttgaactgtgtttgagagacagcagttcagtcagtacataatttgttggtgactaacaaagctcacatctgggagattaactttttttaacgcaaaaatattctgcacattacccatatattgttgaattttacatacaaagcattttgtgctttcattcaattagtttaactatattcagtttctgtattatttctctctgatctatcctgtaattattctatactttagaagaaaagatcagttcatattgttagactgaataattctacatgaagttaaaagttagcaatttaaaaaatttngctgcataataaagataattatagttacatgtattgatttaagtctcacacactgtgctaataagtcctttgcacatattattggattctagagcaaccctaggatttgggtactattatttccatttgacagatgaaaaacctaatgcatagaaagataagtagaccagtcaaggtctacagctagtaaaatgctcagattgaaacctaaatcttttctcactcacttttaggttctatatgctattctccttacgtaacgttaaatagatcctttagtttgataggttcattagttttgcttaatcgttgcttccaatatgattcttattgtagtatttatattacaaagttggcatacagggtcaatatctaatttactgttgtgtttttcttaatatgttcaatgtatggtcatactttttaaatttgattttttaaatattataagtggtcatgaaattttaatgttaagtttgtacctaatagaaatatgtctatcacaaatctttattggtattattttatatacttttccagcttgataattttcacaatagaaagagaccaaatattttgtactatattttgtgacatagaagtaaatgacaactctaccttggaananannaanaaancagtgtttttatgttcaaaaactattttaaatgtcataggcttgccaattgtgttaactatttagtncattggtagtttttaaatgactaatgctggagtgaaaatgtaaggcaaaatatttagtatattaacagtagatagtcattttcatgtaatcagaattgcatgttaagggttttaaaagctgtcataactcttaccttttatttctaccagtgatcaatcatttctctttacaaatttagggaggaaacaactgttcaaatgtataggggacagaaacctgacatttagagaacagaaattttaattgccaaattaaagcagctaggctgcccctgggcttaacaaaattcctatttttgaactagacccgaggtattttatcattattatttgataggtaccattaacctttgttttgtgattatcgacttttggggggaaagatgagtaattaaacacactcgcccattttctaagtggtttagaaggttgcagtctgcctcaccatacaaagccagtttaaataggaatatatcacatcatacttcacatagcagtcaacctcagaggaaagtcatttattcagaaggcatagattttgctagacagcagtgatgcattacaaatatataattatttgcactaatatttgagcaggtggaatggattagaacatggtcaacatcatgctgctgataacatgtatttttctatattaatatgtactgtgcaacatgtattaaaattgtcaataattnannnnannnaananannaatatttatattactgtgtttaagagacagtatccaactgagccacttttaatttaaaagtctgaaactggaattaagtttactttcaaaaatcacttaaattactttataatcagtgaaaggtcagtaaaatgtagaattataagtgcctagtgacttaataggaggaaatatggagggttaaggaaggaagtaggaacctggaataagaaagctaagtttcatttatagttccaatgagtgactttctttgttttcaccactgggaatcttaaatgaagaaagtgtcgtatcccttccagttatctttatgttaataaactaagtgaagtttggatagaactaacaaaggaattagtctccattggtggacttccagagtttt

SEQ ID NO: 379 - DNA, 662 bp, Homo sapiens
  modified_base (144)..(147): a, c, g, or t
  modified_base (157)..(157): a, c, g, or t
  modified_base (161)..(166): a, c, g, or t
  modified_base (379)..(379): a, c, g, or t
  modified_base (591)..(591): a, c, g, or t
tacgccaactggcgaaaggggaatgtgttccaagccattaagttgggtaacgcagggttttcccagtcacgacgttgtaaaacgacggccagtgaattgtaatacgactcactataggccgaattgggtaccgggccccccctnnnntttttttttngaannnnnngagattttgcgttatattttttaaatgaagcaatacaatcattttttatgtatatatctagttgaggagaaaaaattacagattttttcccccttactccaagataatctaaacagattttactctggatggcttaattataacataatccatgaagttatagccagggggttaaataagaagttgatgacaaacttggtttctctaacaagnatgcaagaaaactcaagtgccacaatgaacacccataaactgctgtcaggaggcaaagtccctatgaggtaataataaacccacgaggttaaggcaaaaccctacggttgtttctgcaaacaaatgtccaggaaactcaagtttgtgatgaaagaacagtcttgaattcaacttcagcagaacctttccctccctgggctccaaagcactangtcacctacctctccactcaaatgccccattaagtaccatcctgttggagcttcctaacgcccctgctccc

SEQ ID NO: 380 - DNA, 644 bp, Homo sapiens
  modified_base (23)..(24): a, c, g, or t
ttttttttttttttttttttttnnttcaaaaagcatttttgtttaatgctaagatcacttcagtttccaaggtcatataaagaaacatccaatttagagaaaaaattctgtaataagttcaaataccaaagcgtaaagatgatgtaacacagtgcctatgctgcatggttacacaaatgaaacgagaaaggtagtgattgcttctaaattctcactgaaaatccaatttaaaggtttattgcagtctaggtatttttaatttttcccttggtgattatcaagatggttgatgctaataagtactattaaaaaactaaaatgctgtcgaatatggaacttcttttagttaagaattattaatatagaaaatgtgagttggtggactggtacttcttgtgctctgatttttatttatttattttcttcttttttttgagacagtttcgctcttgttgctcaggctggagcacacaggcacgatctccactcactgcaacctccgcctcccgggttcaaacgattctgctgcctcagcctcctgagtagctgaggcaggagaatcgcttgaacctgggaggtggatgttgcagtgagcagagatcgcgccattgcgatacagcctgggcacaagagcaaacttcgtc

SEQ ID NO: 381 - DNA, 555 bp, Homo sapiens
  modified_base (70)..(72): a, c, g, or t
  modified_base (499)..(499): a, c, g, or t
  modified_base (501)..(501): a, c, g, or t
  modified_base (503)..(503): a, c, g, or t
  modified_base (507)..(508): a, c, g, or t
ttatagggcgaattgggtaccgggccccccctcgagttttttttttttttttttactgtagaaagaaaannntatttgcaaaagttttattttaaaggatcaaaaataaatactgcacatatacacagagaaaatccactgatatttatgttctttgacgcacactttcaatacatggcaccttcatcttctttattgagaaaataaactgttatgggtccataactggtatgcacagtctctgtgactctggcaaataaccaggagccaagtccatataataaagttggaataccgaggttgacgaccttgagcgccgtgaagaagcggttctgccgggccaggtcctgccagggagccttggagcagtggtacttgatgaaggggaagcagccggtgcgcaggacgtggtagttggcgccctgcaccggccagttgaagtgcgagaggccgaactggtcgttgcggacggcgctgtagggcacgcagaaggaggtcncnangcgnnaggcgccgctgcagcagatgccgcgtcagcacctccgaggcgctggg

SEQ ID NO: 382 - DNA, 949 bp, Homo sapiens
  modified_base (57)..(57): a, c, g, or t
  modified_base (679)..(679): a, c, g, or t
  modified_base (691)..(691): a, c, g, or t
  modified_base (718)..(718): a, c, g, or t
  modified_base (759)..(761): a, c, g, or t
  modified_base (808)..(808): a, c, g, or t
ggccgcgctgagcaggtcatctttgtccgagagacccccaacacagcaggcgcaggngccacaggcggcatcatcgggggcatcatcgccgccatcattgctactgctgtggctgccacgggcatccttatctgccggcagcagcggaaggagcagacgctgcagggggcagaggaggacgaagacctggagggacctccctcctacaagccaccgaccccaaaagcgaagctggaggcacaggagatgccctcccagctcttcactctgggggcctcggagcacagcccactcaagaccccctactttgatgctggcgcctcatgcactgagcaggaaatgcctcgataccatgagctgcccaccttggaagaacggtcaggacccttgcaccctggagccacaagcctggggtcccccatcccggtgcctccagggccacctgctgtggaagacgtttccctggatctagaggatgaggagggggaggaggaggaagagtatctggacaagatcaaccccatctatgatgctctgtcctatagcagcccctctgattcctaccagggcaaaggctttgtcatgtcccgggccatgtatgtgtgagctgccatgcgcctggcgtctcacatctcacctgttgatcccttagctttcttgccaaggatctagtgccccntgacctctggcnaggccactgtcagttaacacatatgcnttccatttgtgatgtctaccttggtggctccactatgaccnnnaacccatgagcccagagaaattcaccgtgataatggaatcctggcanccttatctcatgaggcaggaggtggggaaggtgcttctgcacaactctgatcccaaggactcctctcccagactgtgaccttaagaccatacctctcagccccaatggctcgagtcccccaaaattcacaaaggaagaccc

SEQ ID NO: 383 - DNA, 4599 bp, Homo sapiens
tttcaattaactgttccatttttttaaattgccaatttatttttctacccaatccagtatcaacgatatacaaaaggatataaacagactatcatgaatatttacaggatgacacaccaaacaattaccaaggaacaaatcctgcaaagtaacaaattgttgcttatccatgtccactcaactgtacaaggtttatttctaggacaatttcccagttctctgggaaggaagttctgtggatttataccttccataagggtcaagcaaacatgctaagagctgataccatcatgtttttatactaacagccgagaaaggcttttaaagaacactctctttcaggccaatgttacagcattagtgggctcatagacaggatgtgacttcatcaaaggaaatgcttctctcctcttggtctccctaaggtcctcctcctagtacacaggaggagttccccataataacaccctggttccaacagatggtgtgtagattatcaacacacaatgagaaaaagaaactgacccccttacctaccaaatacaatacagatctggggaggcagtttccagatcttcaacaggcagacactatgtggcctgtatttagtacacagcacattctcttaagagaaaacaggaatgaacattctcagaaacattcacattgctcatcaaatgtagctttacccaaagtatataggaaatggcaaaaacctaacctagctggacattttatacaagtaagtcaaagttcaaaggaatcatcctatctttattctcagaaatccaatgttgaatatcacagttcttctttaatggaagcagaagattcagagtccttgtctcccaaaatgcctcagccagggtcagcacagagagtggaatataaaaagcttaattgtgttaatacatggaagacaacagttctcagtcaacctagccacaattttctgtcttggccatctgtaagaaatgactacgtttgaaattcaactttcacattcaaaaaaaagaaatcaattcagcttcagacacaaagcaaaaccaaaacaaaaaaacaaatggcaatagtctacatatctaaacacttgacaattggggaactgtcccacagtgatatgctcaaggccagtagcacctatttataatttggcatgtactgcttgaaggggcaacaggacccggagctaaaatattcaattataaagatataatacatcgatgaatcagacaaaagtagacatatatgataccacattaaagattcatatacagtactgtgctgactttaaagaaaatattttgggacactagaaggaaaagacaataggaaaagaattacaaaggagcatttcagtccaaagccagtccagtgaatatctatgactaggatttccaatctttgatctccaaagaagctgatctaataaattctaacaatacttcgttcacatttgggacacacaacatacttccaagtacagtaatccctctgacgttttggtttcacttgctatttgatgactaagttgtttctggctataaagatcttcctattttaattagccatttaacactacagaggctgctccctttgagagaccagacaagtttcacagaatttgatctaatgaagatgaatggtggggaaaaaagggaacatttcctgggtttttttgcaaacctttttctcttgcttgaaaaactctgcaatcacttaatgttttgctccagaaaaagaaagcaaaactagctgggaaaatacccatacattaatacttcgtgtttactagcatgatacaaaataaattcatagatgtcagtcaattgtttcttaaagaccaaatgtgaatttttaatcttgtaacttaagaactgagtttttccacattcctttatatagagttagcatctgtaaactgagacccttttttgggtaatcatacaaatttaatttgtccctggaaacaaaaacccaacctaacagattaacaaaatatgtccgttagacaatattttttgtgaatattgctgcactgttaccatttttatccttcagtaaatgaaactacacttaaaaagtttatgtattttgagtttacaaagagctaaactcttaattaagaagactatgaaatcaacctatactcatttcagaactggcttccctcctttcaaaagtaaattctaaaagttttttagttattactattaagttatatgagctagagacatttcgactgccatcaatgcttctgtaaaattgaataaagattttattataccacacacacaaaaagcaatcggtacagaaaaggcagttttcagttattctgttgagaatttctttccatgatttctcccattaaagtatagttttcaaagcaaccaccacgacaaaggaagcatctaattagtccgttttcttctgatccaagaatgctgaacatttactgtcccatctgtagttgtatcagcagtgtaatgaacacagtttatattacttaactattctttgaactccaagaactgttgaagtcttttctgatgttctgcagatgcttgcacagcattcagatgttcaccaaatgtagtagttattcgatagatggcagttttcagtgatgctctgaatgcaaatcttaatgttttatatgaagtgtccacaaggcttcctgaaatccggggtggtttactggaagcatgaggaagcttaaagtacttgtcgactgcctcttgcagtgtcaacaaagtattaaggatagctggtagtgtcgtctggacaactccaaatctatcctctgtaaatgatgctgctactaagtgcgacagaccttctaatgcccaaatatgcatttgggcatctgaaaaaacagcctgaatggaggcctctgggtgcctcagcactaatagaggtagatggagaaggattagaaaattcagtcatttgctgatcagaagctgatgtccacaatcttggcccccttcttattagctgaggactttgcggtgacccatagcaggtgtttacatcaaaaattccagccatccgattcattacactagagccaaatggggtcccaaatgggctcacaacatcaggtgtagataattttgaagaaaacagtgatgttttaactaatggtggcactgaaggccgaggcatctggctagattttggtgtctgaaaagcagtttcttctggagaatttaatttcttaggttccactgggtaagatgaagacactctcccattcgtagcagcagcttcttgatagagaatcagtttctgagtcataccatttaaaagattcaaacactcccttgaaatggctgtccaattgtggggatgtccacctggttggctgaggctgaaaacttcttgtcttcgtgaaggagaatattgagaaagcaacatcaggtcctgcaaggctaaatactttatgatggggggaggattgctatttaacacttttggaaggcactcatctgacccttctgcaaatggtggttgaacaggaaacacatgagcctctgtggcatagattttgaagagtatccatgagacataccaagtcgtcaggagaaagacaccacacagccagacatggtagagtaacgagagatttaagaggccactcactgtgtcaagtggcctatgaacctgctcatctatgtgaaggttcatagcagtgctaatccaagctttgggaatatagccaagaaaataatataaaatgcagaaatttctaaccaggaacagtgattccacacaactgtgtttaactaataagagcagagatctcctaaaacgcaagaacttgtattgctgtatgatgggaaatggaagatagttcatgttgttaacaaaatacaggaggctatagctatagcccataaatgctccagtcagtaggaaaaaaagatgatattcatttaagcaggtttgcgcagcagggctaccaaagctgttagtaccagtgcagggaaccacaagaaagctgtactggccctgggttatcactgcagcacaccaggccatcaccattcccattgcagcatgaataaatgagtgcatgagttgctgaggatgaatgatcttccctatcagagctagtctggagcaaggaatagaaggcacaactgcatagaactccacattgaaaatacttattattattattaccactgacagcagcaggaagtaaaagattacataggaactatacaggtcactgaaagaatcagacagccactgtataggatgaaacaaatcaatcctgctgaaaattataaatactgtggtgcagatgggtagaaatagcactgaccaaacaatacttgcaactatcctccagcccaaaacgcgccacagtatgtcccgcgacctgccggcgcagggccggctcacggccgtggccatggagatggcggcccctagtctagggcgtacaggagaccgtgcgcccgcccgccaccgcagttcaaaggcaggaaggccccaggaggaccctgctgggtctgcctcaaacgctgcctgagcgaagcccggcccaggctccaacccatccctgcgaggcttcgtctggacaagctc

SEQ ID NO: 384 - DNA, 1395 bp, Homo sapiens
  modified_base (152)..(152): a, c, g, or t
  modified_base (332)..(332): a, c, g, or t
  modified_base (368)..(369): a, c, g, or t
  modified_base (415)..(415): a, c, g, or t
  modified_base (431)..(431): a, c, g, or t
  modified_base (465)..(465): a, c, g, or t
  modified_base (467)..(467): a, c, g, or t
  modified_base (473)..(473): a, c, g, or t
  modified_base (475)..(475): a, c, g, or t
  modified_base (553)..(553): a, c, g, or t
  modified_base (606)..(606): a, c, g, or t
  modified_base (847)..(847): a, c, g, or t
  modified_base (873)..(873): a, c, g, or t
  modified_base (929)..(929): a, c, g, or t
  modified_base (1228)..(1228): a, c, g, or t
  modified_base (1342)..(1342): a, c, g, or t
  modified_base (1385)..(1386): a, c, g, or t
  modified_base (1388)..(1394): a, c, g, or t
aaagcctttaacaagttctcaacccttattacacatcagataatttatactggagagaaaccctgcaaacatgaatgtggcagagcctttaacaaatcctcaaattatactaaagagaaactacaaacctgaaagatgtgacaatgattttnactacacctcaaacttttctaaacataaaccatattggtgccctagaaatgtgaggaatatgacaaggactttaaatggttgtcacgcttgattgtaggtaagataatttatattggagaaaaatcctccaagtatgaagaatgtggcaaacttttaaccaatcctcacaccttattgcncaggaaagcatttatacttgagaaaaattgtataannaatatggaaaagccatttatatctgctcacatgtaaaaacatcagntcatacttaataaaangcaattaccgtcaaatctttcagaaaatataagncnttaatncngaggaagagtattcttaagatgaacattacaaatagaaagagggttgtagtacctttagttttatgatagatcttatngtacacattttgtaccagaggaaaaccctaaagcattagttgctcaaactttngttcgacatcagggaatttgtattggagaaaaaccctgcaaatgtaataaatatggaaaaacattttttcaaaaactacagcttggaaaacatcagagagttcatactaaaatatatttttgcagatgcagtaaatatgaaaaatatttaatcccaaattaagtctatgtaaatatcagaattcacagtagaaatcataaggcataaggcactgatacttcagacattacactaaattagnagtgttgagtataggagatccaaaantaaaattgttaggtaagttatttatatataactttaaaagaagtagaagatttttnggagatttataattacattcaaagtatacttttttcttgaaaaaaattacagattttttgaaaagcaattgatgtaatttaactctcaaattcatgtttttcttcattcctattatattcacatgtgaaagcaagtgatctgttgttgctgaatcagagatatgagagattcttttttataggtgggcattatttatgcccctttctgtggaagagtaagaaaattaaaatacaagatgcatgaggaaaatgtagagatgctctttgtgattaacttagaatattaagtgctacttgangtacatgttcagactaacattcttttgcagtatagtgagaaaaaaacattttaaaattaattatcattttgttgattgtgcttttatgtaataaaatgcagtactttaaaacanttagattgtgtgtgaacttaattttgtaattaaacattttttnnannnnnnna

SEQ ID NO: 385 - DNA, 1067 bp, Homo sapiens
  modified_base (45)..(45): a, c, g, or t
  modified_base (683)..(683): a, c, g, or t
  modified_base (685)..(685): a, c, g, or t
cccccaaaatttttttttttttttttttttttttttttttttttnaaagaaacaggatttgttttaatgcatgatttaaaaaaatctacattgtcagaatgtaaatctgattatatcacagtacagtggcctgtattgttttgcacatacatttttaacatttcttacattttgaagaaatgaaatacatgaaaataataaaaaaagcacacagtatagaaggataaaataataccaatttctttctcttcccccaacccaaccttagtctctctccttaaaagtaaccactattaacagtttatatttcatactagaaagaagtctgtatatatactggtaaagtacatatacattgattttggtagaaacagtgaggaagagcctcagttttctttctttccaaacagctgctgattatctcaacatcatttattgggaaatgccagtattatccctattgatctgaaatccaacctttattgtatactaaattctcagatgtagttcggtctcttgagactgttctcttccattgaattggtgcttccttctctagtactctaagttatagacaattcactctatactgagttattgtttcacctagtcttcctcttcttactcattctcagactgtttatgtctcccatgtttgtgttggtcaagttccccagactaancntgttggcattttagttgggatttctaaatgaaatacttacttataatttggaaaaattacagaatttagtttttctcaagaacaaaatatatctttccagttattttagtggtttttaaaaaatatctctcaggagagttttaaagttttcttcccatatgtgtatcacatttcacttatttttagatatttgatcatttttgatgactgttgtaaacagaaatattttcttatattttaagtggttatttgtctaggaaagcttttatttattaacacaataacgagtcacctgactaaatcatcttgctctaaattgtttccagttgatttgtttttttctagatatgcaattacattagctgaaagaaagcatatattt

SEQ ID NO: 386 - DNA, 821 bp, Homo sapiens
  modified_base (67)..(67): a, c, g, or t
  modified_base (70)..(71): a, c, g, or t
  modified_base (73)..(77): a, c, g, or t
  modified_base (79)..(82): a, c, g, or t
  modified_base (179)..(179): a, c, g, or t
ttttttacaccaaaaagcaatataatattcacacgattagaatattcctgaaattgcatcttacagnttnntnnnnntnnnntatttataaaagcaattttaatagccaaaaactatgaacaacacaaatgtctatcaccattagaatgaatcctaaagttgtaatatattcatgaaanataatactacacagaaattaaaataactacaaatgaaacaactctgatgaacatcacagacataaaagaagtcatacatgaaatgcacacattgaaccaattatattaaatttttaaaataggcaatctaaacatttatttagggatgcatggttacagactaaaactgcaaagacaagtgattaccataaaactgaggatgaaggtgattaagcgttaaaatcaggaggggacataaaggagcttctggggtactagcaaagttcaatttcttaacccacataagttacacgattacaatgagttttactccattactgaccctgtcagttgaaaaggcctagaagcaatgacaccccagtagcaatgaacatacccagcacgcagatcttgatttccaaatgctattctccactaaaagaaatagaagtgcctggctccagcgttgaaatgagcctggaatatctgattgtgctcaacagcaaagaaatcactcaatggatgattaagtcatatcaaaaggacacaggatcagcttgaaggagctcccattggcctgatttaggacaatttgggcatcaatatgaatgatagtaaagaaatatacacactgaagaaaataagaaaaaaaaaaaaaaaaaa

SEQ ID NO: 387 - DNA, 501 bp, Homo sapiens
tttagtttgaaatttgcattttaatcagcgtttggctaacaatatgagataaactattagagaagtgtaggtcattctggcaaatagaaagttccatcatttcacacttagaaagctgccacgaagagcttattcttggagtataaaatgcagaatttaggttaagccagtcattttgtagatgaaattgtacactggcaatttcttatggttcaacctaatagtaaaacatttataaacaattgtatcattacaaatacatttagacatcgttttctgctaaactcagtattttcctttccatcctgatcaaagaaacattattgcagtaagccacattataattcagcacgatttcttctaaaaaggctccgagttcctttgagcttgttattgtacagtggatttttcatttgcaaagacgttaagccctccaaatgtgcaaatcatgaagtcagttgttgttccagcaaggtttgcccagcggtaaaaaacaagata

SEQ ID NO: 388 - DNA, 478 bp, Homo sapiens
  modified_base (12)..(12): a, c, g, or t
ccaattcatcancaatttatttttttccataaagtcaccaagctgccaaaacattcagtttggccatttaaaatcatttgaaataatggctttacatttttggaatttatttgtttatatatttatatttcattggtgcaaaagtgctttcaaagcagggattgctctcactggttgaggacatatcttgactccctaacgttttcactggaagttgacagagatgatatttaaaatgtataacaagtgagagcataggcacagaccagtcaggatggatgccaatcacaggtaaaccatggggctattccagtatacattagcagcatcttggtcctggcagtgaccatctcacgtgcatctcatccaggatctcttccttctcagtaaaagcgtgtccattttttccttcatgatctatcctttccatttgtactttgcatcccgttcccacaccagggacagcttgagagccaga

SEQ ID NO: 389 - DNA, 552 bp, Homo sapiens
  modified_base (29)..(29): a, c, g, or t
  modified_base (498)..(498): a, c, g, or t
gagagcttagatagagtgtatttttattnttttttttccatttccttttctcttttcatcttttttctttctttctttctttcctttttttcctttgtatttttatcttaacatgcctagacagagaagaacactggattgtacataatgggctttctttgactctcttttccagagtggaaataggattctgtgctccatcattctgagccatcaccaggggccgtccataatcaactatgatgatgagagtgggaagacatgtgtacatatcgcagcggcagcgggcttcagcgatattattcatgagctggcaagagtccctgagtgtaacctgcaggctctggatgtggatgacaggtatccatggtaaccagaaagtgctgggaaactagtcatttccccctaactgaatcttaaaataaaggagatgtttaaggaggtgtcctatacagctatatccctattgccagtaatacacatgggcttgtgacaatnaaaattgctctattttagtgagaggagaagatattattgttatggagaggaaga

SEQ ID NO: 390 - DNA, 896 bp, Homo sapiens
  modified_base (610)..(610): a, c, g, or t
  modified_base (612)..(619): a, c, g, or t
  modified_base (621)..(621): a, c, g, or t
  modified_base (784)..(784): a, c, g, or t
  modified_base (805)..(805): a, c, g, or t
  modified_base (808)..(808): a, c, g, or t
  modified_base (832)..(832): a, c, g, or t
  modified_base (856)..(856): a, c, g, or t
aagaggaaactaaaaccacatttattaatgctgtttaggtggagaaaagttggaaacaacctaaacatcaaaccataagagatgaggtaaacaaaggatgctgtagctatgtaaatgagtactcttacattacaattgctgtaaactaagcttgttgctctagaaagttgttcatataagatattaagtgccaacgtgttttatgaaagactatacatgatattgtgacactacacttacattaaaatatatgtgtacatattatatatgtatgatactatatgactaaatgatcatcttgtctttggggtaagtaggatttggaagtagctttttcttctttttatttgtctacacttccaaagtttttgtaacaagcatgtgctgctttgcaataatgaaaaatagcaatgctaacatttaactgaaaaaagaaaagcacaattatcctggagtagggcaggcactaaaaaggcgggagtaagagcgatgagagtagaacgctgagctgaggctggcctccttcacggccaccttcctccaggggtggatccgtgttccagtcacctccaaacacacaaagatgtcagtgccacagaccatactttcncnnnnnnnncnagtcaaagcaccaggaggggacagagtcaccacagtgcaagtctcagctgggattgggcaggggagaggagaagggcatcaaggagctgaccaggagacacactgatctggccaggcagcctcttgcagaagtggatcccgttaacaatgaaacagatatganatgaacttggcaacttctganaanaggattgtctagtggtgcttctancctaaagtgacccagtttcagatnagacagttttatccagaactcagaggggggaaaagattaa

SEQ ID NO: 391 - DNA, 1564 bp, Homo sapiens
  modified_base (156)..(188): a, c, g, or t
  modified_base (190)..(190): a, c, g, or t
  modified_base (192)..(195): a, c, g, or t
  modified_base (198)..(199): a, c, g, or t
  modified_base (201)..(203): a, c, g, or t
  modified_base (205)..(260): a, c, g, or t
  modified_base (262)..(262): a, c, g, or t
  modified_base (264)..(267): a, c, g, or t
  modified_base (270)..(274): a, c, g, or t
  modified_base (276)..(484): a, c, g, or t
  modified_base (547)..(564): a, c, g, or t
  modified_base (682)..(715): a, c, g, or t
  modified_base (971)..(1025): a, c, g, or t
  modified_base (1312)..(1336): a, c, g, or t
attcggcacgagcgcgcctgtgtcctctctaggaaggggtaggggaggggcgtctggagaggaccccccgcgaatgcccacgtgacgtgcagtccccctggggctgttccggcctgcggggaacatgggcgtgctcagggtcggactgtgccctgnnnnnnnnnnnnnnnnnnnnnnnnnnnnnnnnngncnnnngannannncnnnnnnnnnnnnnnnnnnnnnnnnnnnnnnnnnnnnnnnnnnnnnnnnnnnnnnnncntnnnngtnnnnngnnnnnnnnnnnnnnnnnnnnnnnnnnnnnnnnnnnnnnnnnnnnnnnnnnnnnnnnnnnnnnnnnnnnnnnnnnnnnnnnnnnnnnnnnnnnnnnnnnnnnnnnnnnnnnnnnnnnnnnnnnnnnnnnnnnnnnnnnnnnnnnnnnnnnnnnnnnnnnnnnnnnnnnnnnnnnnnnnnnnnnnnnnnnnnnnnnnnnnnnnnnnnnnnncaggcagaagctctccggaggatccaggtggtgcatgcatttgacatcttccagatgctggannnnnnnnnnnnnnnnnnaggcactgtggcccagcaggtgactggttcttcaggaactgtgaaggtggtggttgtggactcggtcactgcggtggtttccccacttctgggaggtcagcagagggaaggcttggcnnnnnnnnnnnnnnnnnnnnnnnnnnnnnnnnnnctggcccgggaccttggcatggcagtggtggtgaccaaccacataactcgagacagggacagcgggaggctcaaacctgccctcggacgctcctggagctttgtgcccagcactcggattctcctggacaccatcgagggagcaggagcatcaggcggccggcgcatggcgtgtctggccaaatcttcccgacagccaacaggtttccaggagatggtagacattgggacctgggggacctcagagcagagtgccnnnnnnnnnnnnnnnnnnnnnnnnnnnnnnnnnnnnnnnnnnnnnnnnnnnnnnnttggggacccctcccaacttttcttcccagtaacgcctgctgtttactgccacctggcactggtgactacagacgttctcaggctggccagaagagacatcttgggttccttggcctcactctctgtaagcatataaaccacaggcgaaagaggatgctgcattgcgaggacccagaaattcatactggtgccacgtttccttcccttatttctaacgtgtatgtttctggtggaaaccaagttcaccctggctgggagcatctctgatgaggcatgctggcgactnnnnnnnnnnnnnnnnnnnnnnnnnttgtgtcctgtgctccctcctagcgcagtggccaagccgggaaagcctctaacttgcctttgctgctgctgccttttttttcttttgtctctgcctttccatttgttagatgggggcccactcttccttagctctgtctctgagttactgggtggaaataagcttataaatgaaatactcttcttcatctctgttttgctcttaaaaatataaaaaggcaattccccg

SEQ ID NO: 392 - DNA, 4259 bp, Homo sapiens; identical to SEQ ID NO: 312
  modified_base (104)..(120): a, c, g, or t
  modified_base (326)..(357): a, c, g, or t
  modified_base (956)..(958): a, c, g, or t
  modified_base (967)..(967): a, c, g, or t
  modified_base (998)..(998): a, c, g, or t
  modified_base (1036)..(1036): a, c, g, or t
  modified_base (1110)..(1110): a, c, g, or t
  modified_base (1114)..(1114): a, c, g, or t
  modified_base (1116)..(1116): a, c, g, or t
  modified_base (1149)..(1149): a, c, g, or t
  modified_base (1167)..(1167): a, c, g, or t
  modified_base (1296)..(1296): a, c, g, or t
  modified_base (1368)..(1427): a, c, g, or t
  modified_base (1430)..(1431): a, c, g, or t
  modified_base (1433)..(1433): a, c, g, or t
  modified_base (1435)..(1437): a, c, g, or t
  modified_base (1579)..(1579): a, c, g, or t
  modified_base (1606)..(1628): a, c, g, or t
  modified_base (1860)..(1907): a, c, g, or t
  modified_base (1965)..(1965): a, c, g, or t
  modified_base (2007)..(2007): a, c, g, or t
  modified_base (2189)..(2189): a, c, g, or t
  modified_base (2228)..(2228): a, c, g, or t
  modified_base (2351)..(2353): a, c, g, or t
  modified_base (2355)..(2356): a, c, g, or t
  modified_base (2398)..(2399): a, c, g, or t
  modified_base (2401)..(2401): a, c, g, or t
  modified_base (2486)..(2486): a, c, g, or t
  modified_base (2516)..(2516): a, c, g, or t
  modified_base (2566)..(2566): a, c, g, or t
  modified_base (2616)..(2616): a, c, g, or t
  modified_base (2651)..(2673): a, c, g, or t
  modified_base (2677)..(2677): a, c, g, or t
  modified_base (2683)..(2683): a, c, g, or t
  modified_base (2749)..(2749): a, c, g, or t
  modified_base (2752)..(2752): a, c, g, or t
  modified_base (2756)..(2771): a, c, g, or t
  modified_base (2931)..(2932): a, c, g, or t
  modified_base (2956)..(2957): a, c, g, or t
  modified_base (2963)..(2963): a, c, g, or t
  modified_base (2974)..(2974): a, c, g, or t
  modified_base (3062)..(3063): a, c, g, or t
  modified_base (3122)..(3122): a, c, g, or t
  modified_base (3328)..(3328): a, c, g, or t
  modified_base (3476)..(3476): a, c, g, or t
  modified_base (3481)..(3481): a, c, g, or t
  modified_base (3483)..(3506): a, c, g, or t
  modified_base (3691)..(3691): a, c, g, or t
  modified_base (3696)..(3696): a, c, g, or t
  modified_base (3730)..(3730): a, c, g, or t
  modified_base (3946)..(3946): a, c, g, or t
  modified_base (3968)..(3971): a, c, g, or t
  modified_base (3973)..(3973): a, c, g, or t
  modified_base (3975)..(3975): a, c, g, or t
  modified_base (3977)..(3977): a, c, g, or t
  modified_base (3979)..(3980): a, c, g, or t
  modified_base (3982)..(3984): a, c, g, or t
  modified_base (3986)..(3992): a, c, g, or t
  modified_base (4016)..(4016): a, c, g, or t
  modified_base (4024)..(4024): a, c, g, or t
  modified_base (4043)..(4043): a, c, g, or t
  modified_base (4066)..(4066): a, c, g, or t
  modified_base (4081)..(4081): a, c, g, or t
  modified_base (4102)..(4102): a, c, g, or t
  modified_base (4122)..(4122): a, c, g, or t
  modified_base (4127)..(4128): a, c, g, or t
  modified_base (4131)..(4131): a, c, g, or t
  modified_base (4144)..(4144): a, c, g, or t
  modified_base (4161)..(4161): a, c, g, or t
  modified_base (4170)..(4170): a, c, g, or t
  modified_base (4185)..(4185): a, c, g, or t
  modified_base (4187)..(4187): a, c, g, or t
  modified_base (4189)..(4189): a, c, g, or t
  modified_base (4209)..(4209): a, c, g, or t
  modified_base (4213)..(4213): a, c, g, or t
  modified_base (4218)..(4218): a, c, g, or t
  modified_base (4224)..(4224): a, c, g, or t
  modified_base (4227)..(4227): a, c, g, or t
  modified_base (4231)..(4231): a, c, g, or t
  modified_base (4233)..(4233): a, c, g, or t
  modified_base (4246)..(4246): a, c, g, or t

SEQ ID NO: 393 - DNA, 753 bp, Homo sapiens
  modified_base (83)..(120): a, c, g, or t
  modified_base (226)..(247): a, c, g, or t
  modified_base (448)..(463): a, c, g, or t
  modified_base (477)..(478): a, c, g, or t
  modified_base (480)..(480): a, c, g, or t
  modified_base (482)..(482): a, c, g, or t
  modified_base (484)..(487): a, c, g, or t
  modified_base (489)..(491): a, c, g, or t
  modified_base (493)..(493): a, c, g, or t
  modified_base (495)..(495): a, c, g, or t
  modified_base (516)..(516): a, c, g, or t
  modified_base (523)..(523): a, c, g, or t
  modified_base (540)..(543): a, c, g, or t
  modified_base (558)..(583): a, c, g, or t
  modified_base (722)..(722): a, c, g, or t
ttttttttttgtctctgggtagtcacgctagggctggcaggggaggaggcagaggaaaggcagggagaagagaaaacatcacnnnnnnnnnnnnnnnnnnnnnnnnnnnnnnnnnnnnnnaccagcccagcccacacagagggtctgaaaggttctcagccttctccatcacccaccctgcggcctctgaaaagaggggcccatctcagacacaaaagcagatacnnnnnnnnnnnnnnnnnnnnnnaacggaggaatactcacagcaccgtggcacgggacggcccttggcttcagagccgggctggcaccgtttgtaaacattagacctggtgatgtctggggatggaggaggagagggatgcccagcctggaccatcaggtttgatgaaagagacagggtggggcccctcaaggcctgggaaatgtctattagctatgggaaagnnnnnnnnnnnnnnnnggtgggggttgccnngnangnnnngnnnangntctgaatctacctgactatgnatttgcntgacttcagtgctaccnnnngaagtggccaggctnnnnnnnnnnnnnnnnnnnnnnnnnngtaatgagcacaacccctactcaggacagggtgctctgtggaagatggtgggcttctgtccataggcattctccaaaaagaagcagaactggatcttcttatgagaactacgactctttttccccgggattccagcctntgggagttgaaactggggaaagaaagaaggc

SEQ ID NO: 394 - DNA, 2868 bp, Homo sapiens
  modified_base (227)..(227): a, c, g, or t
  modified_base (300)..(300): a, c, g, or t
  modified_base (344)..(344): a, c, g, or t
  modified_base (354)..(354): a, c, g, or t
  modified_base (552)..(554): a, c, g, or t
  modified_base (556)..(560): a, c, g, or t
  modified_base (562)..(572): a, c, g, or t
  modified_base (595)..(596): a, c, g, or t
  modified_base (598)..(609): a, c, g, or t
  modified_base (611)..(611): a, c, g, or t
  modified_base (613)..(615): a, c, g, or t
  modified_base (617)..(627): a, c, g, or t
  modified_base (629)..(629): a, c, g, or t
  modified_base (631)..(636): a, c, g, or t
  modified_base (638)..(638): a, c, g, or t
  modified_base (690)..(690): a, c, g, or t
  modified_base (769)..(769): a, c, g, or t
  modified_base (1657)..(1657): a, c, g, or t
  modified_base (1716)..(1716): a, c, g, or t
  modified_base (1768)..(1768): a, c, g, or t
  modified_base (1792)..(1792): a, c, g, or t
  modified_base (2493)..(2493): a, c, g, or t
  modified_base (2495)..(2497): a, c, g, or t
  modified_base (2501)..(2501): a, c, g, or t
  modified_base (2503)..(2505): a, c, g, or t
  modified_base (2507)..(2507): a, c, g, or t
  modified_base (2629)..(2630): a, c, g, or t
  modified_base (2632)..(2637): a, c, g, or t
  modified_base (2708)..(2708): a, c, g, or t
  modified_base (2779)..(2779): a, c, g, or t
  modified_base (2785)..(2786): a, c, g, or t
gggagggctagtggaagacttaagatggcggcgtttgcacggagtgcaatcactgcgtccttacgggggttgcaaggcgtccgaagtatgagtccactaacaaaagtccagaaactcgccagttaatagtattgtgtctcttcaaaatatcggagaataatttctttctcgctgatcgcctaacttctactgacgaagcttggaagttgcagaaggttggagtgcantggcgcgatctcggctgactgcaacctccacctcctggattcaagctattctcctgcctcagcctgccgagtngctgggattacaggcatgtgccaccgcacccagctaattttgtnttttttagtngagatggggtttctccatgttggtcaggctggtcttgaactcctgacctcaggtgatccgcccacctcagcctcccaaagtgctgggattacaggcgtgagccaccgcgcccggccagaacattagttttaaacttcctaacccttgggagaaggcaaaacacttgatgaaatctacataaagactaaaacattttannnannnnngnnnnnnnnnnntttgaaattgcattgacgactgnnannnnnnnnnnnntnannnannnnnnnnnnngnannnnnncntcattcctgagtctcctgtaccactgagaataggctggagtgcagtggcgcnatctcggctctctgcaaccttcacctcccgtgttcaagtgattctcctgcctcagcctcctgaatacctgagattacangcatgcaccaccacgcccgtctaattttgtattttcactagagacggggtttctccatgttggtcaggctggtctcgaactcccgacctcaggtgatccgcccgcctcagcctcccaaagtgctgggattacaggcatgagccaccgcgtccagcaagaataggtgattttcaaacttggaaacattcagaagttatcgcctcagtttcagattgagtagtctcaaagagattacagacatctaccacaaattctctacttggtgtggtgcaaaatcagtatgatgtaaactttgtctctcagtttcttcaaaggaaagaagcaactggaacacacatataacactaacccttccagctgcattatgagggaccagtacctgtctcaaggcaaaattatgacttagttcatcctcacctctggaggccagtaaaagtgggttatagaagaacaaagaggcatctagatctttcactgggttatttggagagaaacatctcctaccgaaggccagtttaacaagactggtagaggaggttatcttatctaattcacagaaatcaacacattgagtcaagaaaaatgaaacacagaaacactctaaataaaagaagataagtcttcagaaaccaaccctaatgaaatgaagatatgtgattaacctgacaggaaattaaaaagagcaaccataaagagtctcatgggagcaatgcatgaacaaactgagaattttcataaagaaataaaagataacaaaaagtataaagttgaagaatacaataactggactcaaaaatttaatgtgtccaacagaagaatcgatgaagcagaagaaagggctatcaaacttgtagataggccattggaaatcatgtaatgtgaggaganaaaaagaaaaaagattgaagatagtttaagagacttttgagacatcctcaaaggggaantaatttatacattaccagatggagaagatagagggaaaaggacagaaaacantatttgaagaaataatgtcagaanaacctcataattctggcaaggaaatagaaatttagatctaagaatctcgaacatcaggtatgatgaatccaaggagactcacaccaaaccatattgtaattaaataaaggttaaagacaatcttcagagcagcaagggaatagtctcttcttacatacaaaatgatccacggaagactgtcagcagacttcaccagaaaactttcacgccagaaggcagtcgtgatatatacaaaaagctgaaaggaaaacactgccatccaggaatactatctccaactatcctgtgtttcaaaaattaaggagaaatataaagttctcaaacaaaagatgtgggagtttaccaccactagacctgcacgggaagaattgctaaagggagtccttcaagctgtagtaaaagagtgctaattagaaacatgaaaacaaatacaaaaaaaattctaaaacttgtatggaactacaaaagacattaaataatcaaagtaatcttgagcaacaaggacacagctggaggcatcactctacctgattttgtaatccattatcaaaaaactgtggtaccagcataaaaacagattcactgaccagtggaacaggaaagcccagacataactcatacatttccatccaattgatttttgacaaaagtggcacacagaatggggagaggacaaataaataaataaattgttttgaganannngtanannnanatgtgaaattgaaccattttctcatagcatatagaaaaatcaactcaaaatggattaaagcctgaaatgttgcctttgaaactgtaaaactactagtagaaaatataggggaaaagctctannannnnnntctgggcaatgatttcttggatacatccttaaaagcatgggcagcaaaaacagccagacaactatcagggnacctgcccagatagtcacataggttcttttctattttccctaagcattggccgggttgagaaataaagggncagagnnccaaaagaaagaaattttaaagcttggcattcttgggagacaatacatgtcggtagggttcgtgatgccccccgagccgtaa

SEQ ID NO: 395 - DNA, 1522 bp, Homo sapiens
  modified_base (692)..(696): a, c, g, or t
  modified_base (698)..(698): a, c, g, or t
  modified_base (701)..(705): a, c, g, or t
  modified_base (719)..(720): a, c, g, or t
  modified_base (810)..(810): a, c, g, or t
  modified_base (1033)..(1033): a, c, g, or t
  modified_base (1036)..(1036): a, c, g, or t
  modified_base (1376)..(1376): a, c, g, or t
ttttttttttttttttttttttttttttttcttttaaaattcatttataaaaataaattttagtttgagaccctaggtaccaaattgtggcttaatttactcaagatggatgtactacaaagttatgaaaaatgtagctgaaaacccatgagctccagctcatttctgcagcgtggccaacagctgccactgtacactgtcacaacccttctcataggtaaccaaaatacgctcaacgtcttgacaaacttttagccttcctttgtcctgaaactcccacacaactttaattcttagacctccattataaaactattagtaaccataatacattcaagatagagaatgaagacctgtcatccactcaggagacactgaaccagggcactgggacaacacggccactcaggggaaatagtcacccttgtgggtgtacagctcttcagatgttttgcactagaatgcaggcaaaaagtcccttatgtaatttttatctccaagcaacaacatttaaaaatcagttgaagagtgtcagcaggtgcttctaggttctgtgctgtgagcccccaggtcgtggagtgtagggctctggatctctctgtacacgggatagaaacacagtcacgtggaaatgccaatatgacttactgcttagggctgtgctgacatcggcatctctgttagactgattnnnnnangannnnntttttttttttttnngccttagtcaggagattattcgaggaacagtaaagaactgaactaaggaagtagctactggcttccaaagccacacacacacaaaagtangtttcaaactgttgtcctctctcagtgcaaacgagcaattggcggacctgtcacgtttcatcaatcgatacgaacacagcattcagtctgtggaacaatgtgatgcggcaaaaatctgatctaatgcaaattcaagcccattaaataaaaccacagaaaggagagccagcccggctcagtgtcctcgcgcacggacgctgactcgtagcacaaaagcagctgnaanggcacgaggctcagatctcactgatcgtcctctctgaagggcagtactccgaggggcctggcgaggacatgtagaaagactgcgttttccttttcaatcgggcccttttgttggccaacaccagactgcgccggcttgaactgatgatttccgaaatgaacttcttgcagtccacacacacctccatggtgctccagtcctccatcaactctttgggaaactggagttcttcatctgatttgtccatagacttagattttgaggagaacctggcaatgctccgaagtggccgatgatgggcagtggagggtttttctgacctcatactactttcccctcntttgcagagcagaaggtcccaatgaaaagataggaagagtggagtatggtttggagggcagccgcatctttttgcaacactgtgagcacaccggcctcttacagaactgacaggtataagaccaagtgaagaaggaaaacctcccc

SEQ ID NO: 396 - DNA, 1889 bp, Homo sapiens
atggcgtccgggcctcattcgacagctactgctgccgcagccgcctcatcggccgccccaagcgcgggcggctccagctccgggacgacgaccacgacgacgaccacgacgggagggatcctgatcggcgatcgcctgtactcggaagtttcacttaccatcgaccactctctgattccggaggagaggctctcgcccaccccatccatgcaggatgggctcgacctgcccagtgagacggacttacgcatcctgggctgcgagctcatccaggccgccggcattctcctccggctgccgcaggtggcgatggcaacggggcaggtgttgtttcatcgttttttctactccaaatctttcgtcaaacacagtttcgagattgttgctatggcttgtattaatcttgcatcaaaaatcgaagaagcacctagaagaataagagatgtgattaatgtattccaccacctccgccagttaagaggaaaaaggactccaagccccctgatccttgatcagaactacattaacaccaaaaatcaagttatcaaagcagagaggagggtgctaaaggagttgggattttgtgttcatgtcaagcatcctcataagatcattgttatgtatttacaagtcttagaatgtgaacgtaatcaaaccctggttcaaactgcctgggtagtccatgatggtaagtcatagaactctgccctctgcacttcagcccatgacctcaggatggcctgattggctaccctgctctccagccaatccagtgcaagctctcatccgagattcactgaagtggtccatatccatctggcagcatcttctagttctgtcggggtgtcaaaaggatttgtatatttgcttctagaatgtgtatagcatgaatactaccaaaggagacgacaaacttgcagcttaaaatgggcaccagttcccacactggcttaatttatataactgcttggctgtattgcgggaattacatgaatgacagtcttcgaaccaatgtgtttgttcgatttcaaccagagactatagcatgtgcttgcatctaccttgcagctagagcacttcagattccgttgccaactcgtccccattggtttcttctttttggtactacagaagaggaaatccaggaaatctgcatagaaacacttaggctttataccagaaaaaagccaaactatgaattactggaaaaagaagtagaaaaaagaaaagtagccttacaagaagccaaattaaaagcaaagggattgaatccggatggaactccagccctttcaaccctgggtggattttctccagcctccaagccatcatcaccaagagaagtaaaagctgaagagaaatcaccaatctccattaatgtgaagacagtcaaaaaagaacctgaggatagacaacaggcttccaaaagcccttacaatggtgtaagaaaagacagcaagagaagtagaaatagcagaagtgcaagtcgatcgaggtcaagaacacgatcacgttctagatcacatactccaagaagacactataataataggcggagtcgatctggaacatacagctcgagatcaagaagcaggtcccgcagtcacagtgaaagccctcgaagacatcataatcatggttctcctcaccttaaggccaagcataccagagatgatttaaaaagttcaaacagacatggtcataaaaggaaaaaatctcgttctcgatctcagagcaagtctcgggatcactcagatgcagccaagaaacacaggcatgaaaggggacatcatagggacaggcgtgaacgatctcgctcctttgagaggtcccataaaagcaagcaccatggtggcagtcgctcaggacatggcaggcacaggcgctga

SEQ ID NO: 397 - DNA, 2244 bp, Homo sapiens
gggattgtgaatgaagaaagtgaagttttcctcccacacaggttcattggttttgtatcgaatcttgctctcctgggccttgtgcccaactgacatctggacaacaggatttgggttgctgcttattttcttccctgactttaaagctctctgaactgcagtcttcttcaagacatcggggttaaattctaatgggttactcggaaggttccttgctgaatccaagtacaagatcagcaatgcagaggaaagaccatcgttggcttggtctttgtcagctttgatgtctgttagcaccttgtcgaggtttgacgcatttggcattaacgtgagccactccagtctcaagtgtagcttccccttgggaacctcgtccagagtgaaccattcatctaaaaggcgctccttttcaacttcaatgaggtcaatcataagacttcctaaaaagtcatccttgtctgggtcttcatcaaagagctcaatctctaattcttgtccaggatgttcatacactaaagcctcatagacttcattccactttggactgaggttctccttgatgactctgctttggaagatttggttgccaactctaatgattccataggggtctgactttcccttgacaagtcccttaaggtaagtgtctttcccctgaagatcctgagcttcaataaaatgtatccttagaacaccctttggtacaggaaaccgcaactgagctatttgaacttcactgacaagtggaacggtgattcgattgggaagcaccagatagtttgatattatatccaaaatgatagtatctgataaaccattcaatccagggacatccagaagattcgtcagtcctgtccagttaatttctaaaagtggtttcctaaggaagaagatagacaaagctccaactaagggcatatctccaatcaacggttccaggatcacccgcatggtaccatgaatctggatacttttcacaccagctctacaaaaatatcgtttgatctccaaatcaatctcacaatttcctacaaaactaatctgaaggtccaaaataatttgccttttgtctacattttcagtgtataccttaacaccattgatcctgaggggctgctggcccacgtcgaccttcgtgaaactaaaggtgctaaggtgggtgtttgctccccgcacggctggttctatagtttctcgaaacaacttctctataaattggcaaatgaaaggccacatgtgttttacagtcttatttagccattctgctctttcagtgtctggaaaatgaacccaggcgggcaggtcgcaggcgcgcacccccaggcgcacgacgcgctcctcgtcttccagcagcgccagcgcgcggcacaggcgcagggccttgaggccgcggctgcggcgacaccaggcgagcagcgcgagcgcgaggagaacccagctgaagctgagccccaggtagcccagcgcgtacacgggcagcagcagcgcgaagctccgcgccagctgcgccagcagcccgggcagctccacgctcagcacgcccccggggttctcaggcgccgcgcggcccccagccccgccggcgcccgcctccgggccctcgccccgggcgccgctcatcgccccgcagtgccgcgctgccctcccggccgaggcgggctgggtgctcgcgctttcacagaattattccagggtttatgtgtcagggtggtgacttcacacgccataatggcactggtggcaagtccatctatggggagaaatttgaagatgagaacttcatcctaaagcatacgggtcctggcatcttgtccatggcaaatgctggacccaacacaaatggttcccagtttttcatctgcactgccaagactgagtggttggatggcaagcatgtggtgtttggcaaagtgaaagaaggcatgaatattgtggaggccatggagcgctttgggtccaggaatggcaagaccagcaagaagatcaccattgctgactgtggacaactcgaataagtttgacttgtgttttatcttaaccaccagatcattccttctgtagctcaggagagcacccctccaccccatttgctcgcagtatcctagaatctttgtgctctcgctgcagttccctttgggttccatgttttccttgttccctcccatgcctagctggattgcagagttaagtttatgattatgaaataaaaactaaataccaaaaaaaaaaaaaaaaaaaaaaaaa

SEQ ID NO: 398 - DNA, 3186 bp, Homo sapiens
agttaatatgatcctctgttgaagcaagaagacaaactgtatggtggagaaagaagtgggaaggatctgcgcggaagaagcctgagaagatgatgcacagatagagaggcaccaggacttgagaggcaccaggacttgggaggcatgttgatccatctccaggaaagactgagaaaaagagcgttgaatataagaaaaaatacttcctctgttctcagatcgtatttgttttaaggccacacctttttgaagttttcagtttgaaacacaacctggactgaaatcatgagggaggttgtgtaggaaagaatcatcaagggacttagttgggagcttctctaccacagcttactccttatggtattaaccccctttaagtgtaaatgtctttggtttaaaacgtttgtacctcatctgttaccagagtgttcatactggagagaaaccctatgaatttactgaatgtgggggaactgttactcatatgttgcatttcgtcgaacgtgcaagtcatgctgaagagaaaccctgtgcttctaaggagtattgacaagcccttagctagatgacaatctcattgagaagcagaaaattcatgctggagagaaactagtgaaggtagcaatacttcattgaatattagaaaatttttctagagagaaagcattgaatatactgagtatgataacatttcctctcaaaccttatcccttactctgcatttgggagatcatacacagagaagccttataaatgtaagagatgtggaaatatcttcagccaaaagtaaatcctcactcatcaagaaatttttactggagagaaaccttgtgaatgtgggaaagcttccattcagatgtcacacctcagccagcagaaaatttacagtggggaaaacccctttgcctgtaaggtatgtggaaaagtcttcagccacaaatcaaacctcactgagcatgagcattttcacacgagagagaaaccttttgaatgtaacgagtgtggaaaagcctttagccaaaagcagtatgtcattaaacatcagaacacccatactggcgagaagcttttcgaatgtaatgaatgtggaaaatcatttagccagaaggaaaacctccttacgcaccagaaaattcacactggagaaaaaccttttgagtgtaaagattgcgggaaagctttcattcagaagtcaaacctcatcagacaccagagaactcacacaggagagaagccctttgtatgtaaggagtgtggaaaaaccttcagtggcaaatccaaccttactgagcatgagaaaatccatattggagagaagccttttaaatgtagtgaatgtggaacagcctttggccagaagaagtacctcataaaacatcagaacattcacactggagagaaaccctatgaatgtaacgaatgtggaaaagccttctctcagcgaacatcacttattgtacatgtgaggattcattcaggtgataaaccttacgaatgcaatgtttgtggaaaagccttctctcagagctcatctctcactgtgcatgtgagaagccatacaggggagaagccctatggttgtaatgaatgtgggaaagctttctctcagttctcaacccttgctctgcatttgagaatacacacaggtaagaagccttatcagtgcagtgaatgtgggaaagctttcagccagaagtcacaccacattagacaccagaaaattcatactcactaaaaaccccatgaaagccttgaaagtgggaaagctttcattagaaatttgcacctcatcatgccccagaaataatccttctgaagcaaagcaccacgaatgaggttaactttaacaagtactaaaaacttaagggacaccagaaaatttgtactgaagagaaagacatgcatatgattaaaaccctgtgtccaacagagaaacctgcagcagagataatggtgaaagtttaggcacattttcactaaaagtgggaacagaaaatggaggcctgttttttattgctaccaccatagatctggagatcttcgccagtaacaagaaaaattaagttgtaaatattggaaaggaacagacaaaaatagatgacatggtcatctacaactaatattaagactcctgtggtattgattgagcagagcagaagagatttcaaaaaaagacctatgcatttattagaatttggaatatgatacaagtggcatcaggaaatgaggaaataatggaactattttttttaagtggaggtagtttgttctccaagggggaaaaatagaccatgaactatacacaaaagtgaatccagagattaaaaacagaaatatggaaaagctatgtactaaaatgcatatgaccttgggaatagggaaacattccttggaacaatttgagaaatacttagcggttctacttatgagtatgaatgctcaggaaatacgcactaggatatttactgtggcttgatttgtagtagccaaaaattagaaacaactgagaaagcccatcacgaacaatatgggaaattcttatgtaatactatatatctgtaaaatgcaacaaatgaaatccacatgtattaacagaaagatcccagaattgttgaggggggatcaagttgcagaatgatacagatagtacaatgacttttttgtaaatttgaattaaaagtttcctcataaaactcagtactatctattggtaatggatgcatatatgtatgtacatgtacatgtttttgaaacggattggaaggatacagaccaaactcttgatagtggtcacctgtgaagagtggagaagggaaaataatgagtgtgggaggtgggatgggtattggttaaaggggacttcagctttttatataaacatccacttctctttcaaaagacttcaagtaaatataagaagatactgattgattctggattgtggtatagggatatcttgtcttattttttgtacttttctgtatttttaaaatttctcaaaataggaatgggagtgaggatgggaatgctgtatctgtggaagtcatgttatactggattcatttccaattaaatactaaacattttatagaaaatatttctaaaattttatcacggatgaatggatggacttgctctctatgtaatatgaaattaatctattttattaaaatttaaaaggacagc

SEQ ID NO: 399 - DNA, 5581 bp, Homo sapiens
agctcctgtgacagacggagctggagcggcggggcggcggcggagtccggcggccgggagagcgagtgagcgagcggaggagcagcgacacgggagtctagggagcgagaaggagaaggaggggagcgctcgggcgcgagcgagagaaaccgcgagcgccgagcttggactcgagccccggaacggctgaggagcccgcccgctcccctcccctccccctccccgggcccgggcccagcgcgccatcctcccccctccttccctccctccctccttcctccctcccctctccctccccctcccccgccggtggatgggagtgaaggacggaagaggcccggcggaggcggcggtgcagcgctccggtggaatgaatcttacttgttgaatatcttctggttactagttggattcatttgtgaaagaatcattttcccctgtgtggaagacacttagtggcatatttaaattataagtccacggatcaaaaagctttttgatttcccaaaggagggacataccactatatcagataagcttgacattacagccaagatggtgctgtcccagagacaacgagatgaactaaatcgagctatagcagattatcttcgttcaaatggctatgaagaggcatattcagtttttaaaaaggaagctgaattagatgtgaatgaagaattagataaaaagtatgctggtcttttggaaaaaaaatggacatctgttattagattacaaaagaaggttatggaattagaatcaaagctaaatgaagcaaaagaagaatttacgtcaggtggacctcttggtcagaaacgagacccaaaagaatggattccccgtccgccagaaaaatatgcattgagtggtcacaggagtccagtcactcgagtcattttccatcctgtgttcagtgttatggtctctgcttcagaggatgctacaattaaggtgtgggattatgagactggagattttgaacgaactcttaaaggacatacagactctgtacaggacatttcattcgaccacagcggcaagcttctggcttcctgttctgcagatatgaccattaaactatgggattttcagggctttgaatgcatcagaaccatgcacggccatgaccacaatgtttcttcagtagccatcatgcccaatggagatcatatagtgtctgcctcaagggataaaactataaaaatgtgggaagtgcaaactggctactgtgtgaagacattcacaggacacagagaatgggtacgtatggtacggccaaatcaagatggcactctgatagccagctgttccaatgaccagactgtgcgtgtatgggtcgtagcaacaaaggaatgcaaggctgagctccgagagcatgagcatgtggtagaatgcatttcctgggctccagaaagctcatattcctccatctctgaagcaacaggatctgagactaaaaaaagtggtaaacctgggccattcttgctgtctggatccagagacaagactattaagatgtgggatgtcagtactggcatgtgccttatgaccctcgtgggtcatgataactgggtacgtggagttctgttccattctggggggaagtttattttgagttgtgctgatgacaagaccctacgcgtatgggattacaagaacaagcgatgcatgaagaccctcaatgcgcatgaacactttgttacctccttggatttccacaagacggcaccctatgtcgtcactggcagcgtagatcaaacagtaaaagtgtgggagtgccgttgattgtgtctccttcggcccctcctccctcttttcctctggatgcactctgatgataccatggttaccccattgagctctgtttaaataaatattgtcctttcatgtaaattattctggatgtagattgagcttattaaatgttacacacaaagtattcatgcatggtgaatccaaattgtatactgtaaatttacatacgttgtctagaagtaccatagggtttaaaaacctgggctggcattggtcacaccaggcctaagaaggcagaagttgaatcaattgaactagggcactaaactgaatagttgacagtgtcattttatgttggattattaattcctgtttttctttctgctatctgttggtgcctgacttgatggcctcatttggggaaaagtggtggttattagggcttttcctgaaatgtgtatctatgtaacatcacttaagtgtgcttaataaatctcctgtaaggattttagatgataaggctacaattcagaatcttctgaaccatctatgtaatgaatggggattatacattggaatttttgtcatgacacatttgccaaatcagtaggatatatttgttttggcagcctatcacgcagaggctagtggtatatttatgtaagaaaatgactgtaaatctcaagaaaaatctcagcagctaatagcaactcatttatttcattttggtcttaatgctttgtaaacaggtcaaaaaatactgtcatactctaagcttctattttccacactggacatacttctagttgtattctccatactattagactgtgtagtgatgtgacttccaagtagaatttaatctccccattgagtgtgtcatggtacaaatcactattcgtttttggtgttttttagggatgtgcaatgtgcattacataatgacagaaatactgagaaggttctgtgtgcccatttgaaaggagtgggaggaatacagcagtttgtttttcaacatgaatctgatattgatttaaactgtgtttcacttacaagttttaaaaaaatgacagggtttaatggagcgtgcataaaaatgtactgttttcaccttttgtttatatgtaaatgtttgtaagtatatgggcctatctgtaagtgggtaagtctgtatgtgtgtatcatacacatcaacctccatgtccttagtcctgggtttttgaaaaagtgctaaaacggacaagtagaataaatgttgctgtggaatgccatgctttagaacaaaccctttttgatcttaatgcttctgaaaactaggtctgactctggggatttttttccagccgaaggaaaatcacttccgttatgtccccctctaatttagccgctcgacattttacacaacccggatatgttgtatattttgacccaaagttacaggtaggtttaagagaatttttagccatgacttttggagcactattccattgtcagttattaataaagaattccattgcttagctaaccaacaggttttttttgtttccaagagagttatttgaaaagttaacagaacaatgagataacagtgacagtttaacaaagataaaattctgaactgcgttttattcatttgtgtactatgtgattttttaaatgtcccctttagtatttaatggaaaattggttcctgcaaaagacaaagggtgagagttagcgtcctgtagatacacacagagactaggccgtatattaactagaagcagctttatgtctagcttgtgtctttttgtttgtttgcttgtttgtttttagattcctgagagatgtctctggaagggaaagttttgagaactaatggctatttttgaggacaaaaattacatcttaagctaattccttaaatacatacagtaggtgaattttcaggacaatattgcctcacaaccctgcttacattgaaaagtctttttcccttagctcttctgactggatttttctacaaaactatggaaaatatctttgttcttgtttgctgctattttctgtcctattttgagaaatataaatacatagaaatggtgcatcttaacatttgtttgtacatgtataaatgtcttgtattttaattcatttttagcatgaattgtttaagggtaagccacaacatctagaaatcactcatagatattgaacaataaaggagaatggtaccgatgcaggaggaagcaagcgtgtcttcccctgcagcacacagcgacttgcgttgacaaaggaggaggaaacgattactctgtaaacaaagttatccttacttgggagattgccacagcctgctgctgagttgagttaccagacatcctccatgtgagaagcagcgaacattgaatctcagggatggcccacaactgggtccacatgtaatgagccctgtttaataacgaaggggtgggggagagcagtccgtctacaacctggaatcagatttgcaaaatttcctgcactgctgtctgacactgtcctgttgatgccctttctgactgtgttctctgttttctctgtctgctgtctaaccctgtgccttgcctgggataaggacaatgatgaggttactggtttggattgtaagtagaggacttttattaattggtttagaggttcactgctgctttgtcactttctcaatcaaattggccacttaagaaataaagagctggtagaattgcatcctcagatgattattgactgtgtgtgtgtgtgaaaacagacattccagtgccacccaaatatatatctgtaacgtgcccaagaaatcctagctgcgctcttgagagtgcatgccatggagactggtttagacaccgcgtggagcctagttgcctgttgtcacggcatcttgcactttaggagactaagaccgtcctggttcgtctgtgtgtggtgtgaccaatggtgtgcccagagcactactctcaaaatcactagtgttagcaagtcgtcccgggctggggagcgttcgccgtagtctttggaagctttggctttagatttaccaagccccgcctccccgctgccagtgccctgctctcccgttcgcctctttctgtttctgtgtgaactttcccggtaatatcactcgttaaataggttttctttaaacttaattaaggaaaaactatttaaaggtaaaggatattttgttgacatcggtggctcgatcatccttaagcaactgaagttaaaattgttgaaggaaaaggcacttaaattggttactttcatgtccagctgtatataagtccagtgtgttcatctagatgacgcaaagaatctcctggtagagaagcgacatgtaaaaaactggtggaaaaaggttttggattttttttccagtggggtggggggagggcaagctggatttacaggtcacggctggactgaatgggcctttttatcttcccactgtatcatggaagtagctgcttgcttgtactgtccatccttcaggcatccctaaagctcactctgaagatgttagagacaaacacaaactcttcgagttaaagttgatcctgacactgacatgaaggcaagccttgatttcgtatgaacgttgctgaagtggtaattgaggaaaacagttccccagattgttaagagttcactgaagatattgacacaattttaaaaaatcagtaaaggaatgtatataatattgctctcgtgttttacagtaagatttgttgctctcagactgtgtaaaacaaaatttattcatgttttctgcatattaaaaaatcttattgtaccaactggtaaaccg

SEQ ID NO: 400 - DNA, 737 bp, Homo sapiens
ggagtttcgccgccgcagtcttcgccaccatgccgccctacaccgtggtctatttcccagttcgaggccgctgcgcggccctgcgcatgctgctggcagatcagggccagagctggaaggaggaggtggtgaccgtggagacgtggcaggagggctcactcaaagcctcctgcctatacgggcagctccccaagttccaggacggagacctcaccctgtaccagtccaataccatcctgcgtcacctgggccgcacccttgggctctatgggaaggaccagcaggaggcagccctggtggacatggtgaatgacggcgtggaggacctccgctgcaaatacatctccctcatctacaccaactatgaggcgggcaaggatgactatgtgaaggcactgcccgggcaactgaagccttttgagaccctgctgtcccagaaccagggaggcaagaccttcattgtgggagaccagatctccttcgctgactacaacctgctggacttgctgctgatccatgaggtcctagcccctggctgcctggatgcgttccccctgctctcagcatatgtggggcgcctcagcgcccggcccaagctcaaggccttcctggcctcccctgagtacgtgaacctccccatcaatggcaacgggaaacagtgagggttggggggactctgagcgggaggcagagtttgccttcctttctccaggaccaataaaatttctaagagagct

SEQ ID NO: 401 - DNA, 3115 bp, Homo sapiens
ccaccatatcggtcccgtatttcacattgataaggtcctgtttcatttctcgtgacattgggtagaatgaggatcctgttttcaatgggtcgctttaccctgggactgacagggaggctctgaccatttagccaccaaatgtaggtgtagttctcactcttaggttcaccccgcggccgatcgtcccccatacctcggccatgcggcccctgctgctactggccctgctgggctggctgctgctggccgaagcgaagggcgacgccaagccggaggacaaccttttagtcctcacggtggccactaaggagaccgagggattccgtcgcttcaagcgctcagctcagttcttcaactacaagatccaggcgcttggcctaggggaggactggaatgtggagaaggggacgtcggcaggtggagggcagaaggtccggctgctgaagaaagctctggagaagcacgcagacaaggaggatctggtcattctcttcacagacagctatgacgtgctgtttgcatcggggccccgggagctcctgaagaagttccggcaggccaggagccaggtggtcttctctgctgaggagctcatctacccagaccgcaggctggagaccaagtatccggtggtgtccgatggcaagaggttcctgggctctggaggcttcatcggttatgcccccaacctcagcaaactggtggccgagtgggagggccaggacagcgacagcgatcagctgttttacaccaagatcttcttggacccggagaagagggagcagatcaatatcaccctggaccaccgctgccgtatcttccagaacctggatggagccttggatgaggtcgtgctcaagtttgaaatgggccatgtgagagcgaggaacctggcctatgacaccctcccggtcctgatccatggcaacgggccaaccaagctgcagttgaactacctgggcaactacatcccgcgcttctggaccttcgaaacaggctgcaccgtgtgtgacgaaggcttgcgcagcctcaagggcattggggatgaagctctgcccacggtcctggtcggcgtgttcatcgaacagcccacgccgtttgtgtccctgttcttccagcggctcctgcggctccactacccccagaaacacatgcgacttttcatccacaaccacgagcagcaccacaaggctcaggtggaagagttcctggcacagcatggcagcgagtaccagtctgtgaagctggtgggccctgaggtgcggatggcgaatgcagatgccaggaacatgggcgcagacctgtgccggcaggaccgcagctgcacctactacttcagcgtggatgctgacgtggccctgaccgagcccaacagcctgcggctgctgatccaacagaacaagaatgtcattgccccgctgatgacccggcatgggaggctgtggtcgaacttctggggggctctcagtgcagatggctactatgcccgttccgaggactacgtggacattgtgcaggggcggcgtgttggtgtctggaatgtgccctatatttcaaacatctacttgatcaagggcagtgccctgcggggtgagctgcagtcctcagatctcttccaccacagcaagctggaccccgacatggccttctgtgccaacatccggcagcaggatgtgttcatgttcctgaccaaccggcacacccttggccatctgctctccctagacagctaccgcaccacccacctgcacaacgacctctgggaggtgttcagcaaccccgaggactggaaggagaagtacatccaccagaactacaccaaagccctggcagggaagctggtggagacgccctgcccggatgtctattggttccccatcttcacggaggtggcctgtgatgagctggtggaggagatggagcactttggccagtggtctctgggcaacaacaaggacaaccgcatccagggtggctacgagaacgtgccgactattgacatccacatgaaccagatcggctttgagcgggagtggcacaaattcctgctggagtacattgcgcccatgacggagaagctctaccccggctactacaccagggcccagtttgacctggcctttgtcgtccgctacaagcctgatgagcagccctcactgatgccacaccatgatgcctccaccttcaccatcaacatcgccctgaaccgagtcggggtggattacgagggcgggggctgtcggttcctgcgctacaactgttccatccgagccccaaggaagggctggaccctcatgcaccctggacgactcacgcattaccatgaggggctccccaccaccaggggcacccgctacatcgcagtctccttcgtcgatccctaattggccaggcctgaccctcttggacctttcttctttgccgacaaccactgcccagcagcctctgggacctcggggtcccagggaacccagtccagcctcctggctgttgacttcccattgctcttggagccaccaatcaaagagattcaaagagattcctgcaggccagaggccggaacacacctttatggctggggctctccgtggtgttctggacccagcccctggagacaccattcacttttactgctttgtagtgactcgtgctctccaacctgtcttcctgaaaaaccaaggcccccttcccccacctcttccatggggtgagacttgagcagaacaggggcttccccaagttgcccagaaagactgtctgggtgagaagccatggccagagcttctcccaggcacaggtgttgcaccagggacttctgcttcaagttttggggtaaagacacctggatcagactccaagggctgccctgagtctgggacttctgcctccatggctggtcatgagagcaaaccgtagtcccctggagacagccactccagagaacctcttgggagacagaagaggcatctgtgcacagctcgatcttctacttgcctgtggggaggggagtgacaggtccacacaccacactgggtcaccctgtcctggatgcctctgaagagagggacagaccgtcagaaactggagagtttctattaaaggtcatttaaaccac

SEQ ID NO: 402 - DNA, 3512 bp, Homo sapiens
cgagccacccagctgagaggagaggcgcccccggggacgcactgagattatgaggctctggcctccactggccactcactcgtgaccctttccaccacggcggagccttccaagcctacctcctgccgtgtggtgatctacctgcagcgggagatgtcgggggacacctgcctgtgcccagcctcaggggccaagcccaagctcagtggcttcaagggaggagggttgggcaacaagtatgtccagctcaacgtgggcggctctctgtactacaccactgtgcgggccctgacccgccacgacaccatgctcaaggccatgttcagtgggcgcatggaggtgctgaccgacaaagaaggctggatcctcatagaccgttgtggaaagcactttggcaccattttgaattacctccgagatgacaccatcaccctccctcagaaccggcaagaaatcaaggaattgatggctgaagcaaagtattacctcatccaggggctggtgaatatgtgccagagtgccctgcaggacaagaaggactcctaccagcctgtgtgcaacatccccatcatcacatccctaaaggaggaggagcggctcatcgaatcctccaccaagcccgtggtgaagctgctgtacaacagaagcaacaacaagtattcctacaccagcaactctgacgaccacctgctgaaaaacatcgagctgtttgacaagctctccctgcgcttcaacggccgcgtgctcttcatcaaggatgtcattggtgacgagatctgctgctggtccttttatggccagggccgtaagctggcagaggtgtgctgtacctccatcgtgtatgccacggagaagaagcagaccaaggtggaattcccagaggcccgaatctatgaggagacactcaacgtcctactctatgagactccccgcgtccccgacaactccttgttggaggccacaagccgtagccgcagccaggcttcccccagtgaagatgaggagacctttgaactgcgggaccgtgtccgccgcatccacgtcaagcgctacagcacttacgatgaccggcagctcggccaccagtctacccatcgcgactgaccagaccctcagggagtcagggcacgggaggccctatctcccatcctgtggaacccgccccattggccaccccatgctgctgctgcctgggtctctgctctagcacccagaggcatgacaggccctgctcagaggtcagagggtctgggcagaggagggaccacattcccctgccttgcccctgagcacttctggagactgcgtcctgtcctatctgctcaccatcacccttcctgcccgacggagctgcttctgctccctggggcatatggactgacccacctcctgctgagaaccttcccctaggccctgtgcagaagggctactgccccttaggcctcagctgggggaaaggcagttctggtgctgtagaggccctggtgcagaaagtgggacgtcctttttcctaaggtgtttaagcacaggcttgataagtttggtttttaaaaaataatctaggaaatgaataattctaaatctagtaatgaggaaactgagcatttcttttgccctccagggtgccaagaccctacatatgacagaacccttggcccttctccatgcctgtgggatctgtttctttaaagcactttgtactgttattcaggaggttgataatctccttgacccatgtctttctaccctaatccccacttccctgcagaatcaatctgagggaggggataaagaggaagcaataaaaaaaaaacatccgacagagcagctctggctttgccagcctggccagcagctcagagtgcaccgaggagggaaggatggctaagctgggaccggcagtcctcacagggtgcctgtgagaaaggacattttacccccacatcatagtcacatcactgactcctaggtctagcacgactgctctttgtgatcctcttgagtacccttggcttccagccatgctgtcctcacatacggtaaagccaaagagctgtcacatgggccagaaacatgagccacggcaggaagaccgtggagcccgtgggcactgcatggtgttggctggcatgcccatcagctgaggacagcaaactcccagcagcccctacagaggtggcacatgcttggccacacatctactccctgcccacaccatctatgctcttggttggtgctggctgggatggcggttctgcccagtggtgtctctgagcgcgggatgacaggagcaaccgaagcaccctgaaggccttcactccttgttgggtaactcagccatggagatgccaagcactagccaggaggtgagttcctctttagggctttggttttcattcctttttgtttggcttggccaaaccagaattcagcttatctgaattattttccaaaggaatgctgtcagggagggactgttctgccagcctaacaaagcaacgtagccacgtatagtacccacttctgctctttggagagaacacaggttatcaagttcatctctcttgactactcttatgatagctgatgccacagagcctatgggcaaatgccagacccagggttagacacaaggacctgaagtgacatgacggcgggacaggggaaatgtgactttctaattaggcattttatgttagtcacagtcttgaatgtataaacagcactaagactctcaggtcaggtaccttggtgatcagctactagttcttccagccctcattgaggtaacaagataaagacaaatccacttctttggccaaattcaggctttggctttatgactttcccacagagactggaatgcgtcagcctgagaccactggcctattttctcagctgccctcttgaggtcctttaacactcaaattcccagctccccactgaggtgttgtgatgcttgccttttgacctccccatcccctttagtccctgcttactactttgacattcacatcctcagtgtctcagtcttttttgccgagaaagcacagtagtctgggactgggcatttatcttctctgactgaaaatctctccttggtcttaaggaaaatactaacattgaactcactgacatgatcttagcttctttaatcagactttgtgacttaaaagtttgggggttttctttgaaagtttccagccctattcagaaagcaactcttggctgtgtgcatttttcaactccaagcagcccaggggtaagtaaacaaagtatggatgaaggtcagattttcttgtcagtttctgagaaacctggcagcctgctgttaacaacacaggccagtattgggttttattgaatttggtatgtgaccaaggtcggcctaaaggatggcgcaggtcctgggcaggaaagaatttttcctttatcacataactgtaatatttggttgctcagcataagtgatggaagcaaacactaatttctaataaaattgtgttaaactc

SEQ ID NO: 403 - DNA, 1370 bp, Homo sapiens
ggcggcggcagctgtacagggcgggagaagcggtggtagcggaggctgtagtggggctggtggtgcttccaactgcgggacaggaagtggccgtagcggcttgttggataagtggaagatagatgataagcctgtaaaaattgacaagtgggatggatcagctgtgaaaaactctttggatgattctgccaaaaaggtacttctggaaaaatacaaatatgtggagaattttggtctaattgatggtcgcctcaccatctgtacaatctcctgtttctttgccatagtggctttgatttgggattatatgcacccctttccagagtccaaacccgttttggctttgtgtgtcatatcctattttgtgatgatggggattctgaccatttatacctcatataaggagaagagcatctttctcgtggcccacaggaaagatcctacaggaatggatcctgatgatatttggcagctgtcctccagtcttaaaaggtttgatgacaaatacaccttgaagctgaccttcatcagtgggagaacaaagcagcagcgggaagccgagttcacaaagtccattgctaagttttttgaccacagtgggacactggtcatggatgcatatgagcctgaaatatccaggctccatgacagtcttgccatagaaagaaaaataaagtagccaattctaaaagtagccctctttctcctggatcttgctgaattagtggcttggggggtgggggagataaaaagaacttaaaatgggtaaagtaagaaatgttaaaaagtccctgttttgtcctgaaattttagtctattctgggtaaataggattttctgacacagatatgagaagttgtagctctgatgtctagctgtagtctccttgatctgctgattgcattattttaatttgcttttctgggaaagcagttttgctaaaagctgtacagactttttcttttgtacctagcagtactttatatagtatagctttgggccatgtagcattttaagactcaattttaaaaaattattaatctgttgctgactcttaattcctatttcaatatgtgtttccttgaagaattcaggatacaacttcttgtgtatgacagctttccttcacacactatttttgtgggtgtgtatatatctgatttgggaagaatttaaaaaacacatagctttttaatttgtttgaaacagactttctgcctgttacatttttgcttttaaccaattaaagaagccaatggcattttagttttatattgtgttttccactagtatatccctgttgatttgtttgtgccttttattaactgccattttctaaaatttttttcaataaaaggaaggaagatgtg

SEQ ID NO: 404 - DNA, 3088 bp, Homo sapiens
acaaaaaagcttttacgaggtatcagcacttttctttcattagggggaaggcgtgaggaaagtaccaaacagcagcggagttttaaactttaaatagacaggtctgagtgcctgaacttgccttttcattttacttcatcctccaaggagttcaatcacttggcgtgacttcactacttttaagcaaaagagtggtgcccaggcaacatgggtgactggagcgccttaggcaaactccttgacaaggttcaagcctactcaactgctggagggaaggtgtggctgtcagtacttttcattttccgaatcctgctgctggggacagcggttgagtcagcctggggagatgagcagtctgcctttcgttgtaacactcagcaacctggttgtgaaaatgtctgctatgacaagtctttcccaatctctcatgtgcgcttctgggtcctgcagatcatatttgtgtctgtacccacactcttgtacctggctcatgtgttctatgtgatgcgaaaggaagagaaactgaacaagaaagaggaagaactcaaggttgcccaaactgatggtgtcaatgtggacatgcacttgaagcagattgagataaagaagttcaagtacggtattgaagagcatggtaaggtgaaaatgcgaggggggttgctgcgaacctacatcatcagtatcctcttcaagtctatctttgaggtggccttcttgctgatccagtggtacatctatggattcagcttgagtgctgtttacacttgcaaaagagatccctgcccacatcaggtggactgtttcctctctcgccccacggagaaaaccatcttcatcatcttcatgctggtggtgtccttggtgtccctggccttgaatatcattgaactcttctatgttttcttcaagggcgttaaggatcgggttaagggaaagagcgacccttaccatgcgaccagtggtgcgctgagccctgccaaagactgtgggtctcaaaaatatgcttatttcaatggctgctcctcaccaaccgctcccctctcgcctatgtctcctcctgggtacaagctggttactggcgacagaaacaattcttcttgccgcaattacaacaagcaagcaagtgagcaaaactgggctaattacagtgcagaacaaaatcgaatggggcaggcgggaagcaccatctctaactcccatgcacagccttttgatttccccgatgataaccagaattctaaaaaactagctgctggacatgaattacagccactagccattgtggaccagcgaccttcaagcagagccagcagtcgtgccagcagcagacctcggcctgatgacctggagatctagatacaggcttgaaagcatcaagattccactcaattgtggagaagaaaaaaggtgctgtagaaagtgcaccaggtgttaattttgatccggtggaggtggtactcaacagccttattcatgaggcttagaaaacacaaagacattagaatacctaggttcactgggggtgtatggggtagatgggtggagagggaggggataagagaggtgcatgttggtatttaaagtagtggattcaaagaacttagattataaataagagttccattaggtgatacatagataagggctttttctccccgcaaacacccctaagaatggttctgtgtatgtgaatgagcgggtggtaattgtggctaaatatttttgttttaccaagaaactgaaataattctggccaggaataaatacttcctgaacatcttaggtcttttcaacaagaaaaagacagaggattgtccttaagtccctgctaaaacattccattgttaaaatttgcactttgaaggtaagctttctaggcctgaccctccaggtgtcaatggacttgtgctactatatttttttattcttggtatcagtttaaaattcagacaaggcccacagaataagattttccatgcatttgcaaatacgtatattctttttccatccacttgcacaatatcattaccatcactttttcatcattcctcagctactactcacattcatttaatggtttctgtaaacatttttaagacagttgggatgtcacttaacattttttttttttgagctaaagtcagggaatcaagccatgcttaatatttaacaatcacttatatgtgtgtcgaagagtttgttttgtttgtcatgtattggtacaagcagatacagtataaactcacaaacacagatttgaaaataatgcacatatggtgttcaaatttgaacctttctcatggatttttgtggtgtgggccaatatggtgtttacattatataattcctgctgtggcaagtaaagcacactttttttttctcctaaaatgtttttccctgtgtatcctattatggatactggttttgttaattatgattctttattttctctcctttttttaggatatagcagtaatgctattactgaaatgaatttcctttttctgaaatgtaatcattgatgcttgaatgatagaattttagtactgtaaacaggctttagtcattaatgtgagagacttagaaaaaatgcttagagtggactattaaatgtgcctaaatgaattttgcagtaactggtattcttgggttttcctacttaatacacagtaattcagaacttgtattctattatgagtttagcagtcttttggagtgaccagcaactttgatgtttgcactaagattttatttggaatgcaagagaggttgaaagaggattcagtagtacacatacaactaatttatttgaactatatgttgaagacatctaccagtttctccaaatgccttttttaaaactcatcacagaagattggtgaaaatgctgagtatgacacttttcttcttgcatgcatgtcagctacataaacagttttgtacaatgaaaattactaatttgtttgacattccatgttaaactacggtcatgttcagcttcattgcatgtaatgtagacctagtccatcagatcatgtgttctggagagtgttctttattcaataaagttttaatttagtataaacat

SEQ ID NO: 405 - DNA, 2908 bp, Homo sapiens
atgtgggcgctttgctcgctgctgcggtccgcggccggacgcaccatgtcgcagggacgcaccatatcgcaggcacccgcccgccgcgagcggccgcgcaaggacccgctgcggcacctgcgcacgcgagagaagcgcggaccgtcggggtgctccggcggcccaaacaccgtgtacctgcaggtggtggcagcgggtagccgggactcgggcgccgcgctctacgtcttctccgagttcaaccggtatctcttcaactgtggagaaggcgttcagagactcatgcaggagcacaagttaaaggttgctcgcctggacaacatattcctgacacgaatgcactggtctaatgttgggggcttaagtggaatgattcttactttaaaggaaaccgggcttccaaagtgtgtactttctggacctccacaactggaaaaatacctcgaagcaatcaaaatattttctggtccattgaaaggaatagaactggctgtgcggccccactctgccccagaatacgaggatgaaaccatgacagtttaccagatccccatacacagtgaacagaggaggggaaagcaccaaccatggcagagtccagaaaggcctctcagcaggctcagtccagagcgatcttcagactccgagtcgaatgaaaatgagccacaccttccacatggtgttagccagagaagaggggtcagggactcttccctggtcgtagctttcatctgtaagcttcacttaaagagaggaaacttcttggtgctcaaagcaaaggagatgggcctcccagttgggacagctgccatcgctcccatcattgctgctgtcaaggacgggaaaagcatcactcatgaaggaagagagattttggctgaagagctgtgtactcctccagatcctggtgctgcttttgtggtggtagaatgtccagatgaaagcttcattcaacccatctgtgagaatgccacctttcagaggtaccaaggaaaggcagatgcccccgtggccttggtggttcacatggccccagcatctgtgcttgtggacagcaggtaccagcagtggatggagaggtttgggcctgacacccagcacttggtcctgaatgagaactgtgcctcagttcacaaccttcgcagccacaagattcaaacccagctcaacctcatccacccggacatcttccccctgctcaccagtttccgctgtaagaaggagggccccaccctcagtgtgcccatggttcagggtgaatgcctcctcaagtaccagctccgtcccaggagggagtggcagagggatgccattattacttgcaatcctgaggaattcatagttgaggcgctgcagcttcccaacttccagcagagcgtgcaggagtacaggaggagtgcgcaggacggcccagccccagcagagaaaagaagtcagtacccagaaatcatcttccttggaacagggtctgccatcccgatgaagattcgaaatgtcagtgccacacttgtcaacataagccccgacacgtctctgctactggactgtggtgagggcacatttgggcagctgtgccgtcattacggagaccaggtggacagggtcctgggcaccctggctgctgtgtttgtgtcccacctgcacgcagatcaccacacgggcttgccaagtatcttgctgcagagagaacgcgccttggcatctttgggaaagccgcttcaccctttgctggtggttgcccccaaccagctcaaagcctggctccagcagtaccacaaccagtgccaggaggtcctgcaccacatcagtatgattcctgccaaatgccttcaggaaggggctgagatctccagtcctgcagtggaaagattgatcagttcgctgttgcgaacatgtgatttggaagagtttcagacctgtctggtgcggcactgcaagcatgcgtttggctgtgcgctggtgcacacctctggctggaaagtggtctattccggggacaccatgccctgcgaggctctggtccggatggggaaagatgccaccctcctgatacatgaagccaccctggaagatggtttggaagaggaagcagtggaaaagacacacagcacaacgtcccaagccatcagcgtggggatgcggatgaacgcggagttcattatgctgaaccacttcagccagcgctatgccaaggtccccctcttcagccccaacttcagcgagaaagtgggagttgcctttgaccacatgaaggtctgctttggagactttccaacaatgcccaagctgattcccccactgaaagccctgtttgctggcgacatcgaggagatggaggagcgcagggagaagcgggagctgcggcaggtgcgggcggccctcctgtccagggagctggcaggcggcctggaggatggggagcctcagcagaagcgggcccacacagaggagccacaggccaagaaggtcagagcccagtgaagatctgggagaccctgaactcagaaggctgtgtgtcttctgccccacgcacgcacccgtatctgccctccttgctggtagaagctgaagagcacggtcccccaggaggcagctcaggataggtggtatggagctgtgccgaggcttgggctcccacataagcactagtctatagatgcctcttaggactggtgcctggcacagccgcgggccaggaggctgccacacggaagcaagcagatgaactaatttcatttcaaggcagtttttaaagaagtcttggaaacagacggcggcacctttcctctaatccagcaaagtgattccctgcacaccagagacaagcagagtaacaggatcagtgggtctaagtgtccgagacttaacgaaaatagtatttcagctgcaataaagattgagtttgcaa

SEQ ID NO: 406 - DNA, 1209 bp, Homo sapiens
cgaagcgaggagcagcgatggacggtcgggtgcagctgataaaggccctcctggccttgccgatccggcctgcgacgcgtcgctggaggaacccgattccctttcccgagacgtttgacggcgataccgaccgactcccggagttcatcgtgcagacgggctcctacatgttcgtggacgagaacacgttctccagcgacgccctgaaggtgacgttcctcatcacccgcctcacagggcccgccctgcagtgggtgatcccctacatcaagaaggagagccccctcctcaatgattaccggggctttctggccgagatgaagcgagtctttggatgggaggaggacgaggacttctaggccgggagaccctcgggcctgggggcgggtgctctggggagggtccgctgtgttactggccgccgccagggtcgccaccggcgccctccctccgcgcctccctccccctcgagccgccgcgatgtcccctgcgctcctgttccctcccgcgtagtgcttgcctttgttccaggaatagcgctccaggctcctgctgccgcccctgggcctcactctggagcgagccgccgccctctccttccagccagccagcccctcccatgtacatttggacgctgtcctgcgctccagctgcaagctgggctcctgttacacactggacagaccacccactgccgccgctgccaagccctctcctccccaccagactgccagacgactacatcattctgcccacagacctgcgctgccacagccatcgccatccatcgcatcccaccgacagactgctgctcctagtgatctggactcacctcggaggtatctgggctggccacagtccctggacagtgatccagacagctggccgccccccaagggatctgtcaccttcagcgagacctatttcctccccacccccagaaacctcttgtgttcttgcctaggcccaggtgttcctggcagccaaatcgagtctctcattttctcttgtggaccagttagttttgcccataacgcagtattctgagtttgcaactgtctctctgatgtgtgccttttgttcaacacagtaacccctgcattctgctctgctctaatacactacctggagaaagtcttttccttattttcaataaatgtcagacattattgaaaagaaaaaaaaaaaaaaaaaaaaaaaaaaaaaaaa

SEQ ID NO: 407 - DNA, 1750 bp, Homo sapiens
gtggccgccgtcgcccggatcccctgagctgcccgccatcccacgtgaccgcgccgccccccagctccaccgctgagcccgctcgccatggccctcttcggggccctcttcctagcgctgctggcaggcgcacatgcagagttcccaggctgcaagatccgcgtcacctccaaggcgctggagctggtgaagcaggaggggctgcgctttctggagcaagagctggagactatcaccattccggacctgcggggcaaagaaggccacttctactacaacatctctgaggtgaaggtcacagagctgcaactgacatcttccgagctcgatttccagccacagcaggagctgatgcttcaaatcaccaatgcctccttggggctgcgcttccggagacagctgctctactggttcttctatgatgggggctacatcaacgcctcagctgagggtgtgtccatccgcactggtctggagctctcccgggatcccgctggacggatgaaagtgtccaatgtctcctgccaggcctctgtctccagaatgcacgcggccttcgggggaaccttcaagaaggtgtatgattttctctccacgttcatcacctcagggatgcgcttcctcctcaaccagcagatctgccctgtcctctaccacgcagggacggtcctgctcaactccctcctggacaccgtgcctgtgcgcagttctgtggacgagcttgttggcattgactattccctcatgaaggatcctgtggcttccaccagcaacctggacatggacttccggggggccttcttccccctgactgagaggaactggagcctccccaaccgggcagtggagccccagctgcaggaggaagagcggatggtgtatgtggccttctctgagttcttcttcgactctgccatggagagctacttccgggcgggggccctgcagctgttgctggtgggggacaaggtgccccacgacctggacatgctgctgagggccacctactttgggagcattgtcctgctgagcccagcagtgattgactccccattgaagctggagctgcgggtcctggccccaccgcgctgcaccatcaagccctctggcaccaccatctctgtcactgctagcgtcaccattgccctggtcccaccagaccagcctgaggtccagctgtccagcatgactatggacgcccgtctcagcgccaagatggctctccgggggaaggccctgcgcacgcagctggacctgcgcaggttccgaatctattccaaccattctgcactggagtcgctggctctgatcccattacaggcccctctgaagaccatgctgcagattggggtgatgcccatgctcaatgagcggacctggcgtggggtgcagatcccactacctgagggcatcaactttgtgcatgaggtggtgacgaaccatgcgggattcctcaccatcggggctgatctccactttgccaaagggctgcgagaggtgattgagaagaaccggcctgctgatgtcagggcgtccactgcccccacaccgtccacagcagctgtctgagccctcaatccccaagctggcagctgtcattcaggaccccaacccctctcagcccctcttttcccacattcatagcctgtagtgccccctctaacccccagtgccacagagaagacgggatttgaagctgtacccaatttaattccataatcaatctatcaattacagtccgtccaccacc

SEQ ID NO: 408 - DNA, 1652 bp, Homo sapiens
tcccgacgagcaacgcgtttgtagaggggtgggtgcgcacgctctgtccctgcgtgaccttccgaccccgctgtcctcaccgcaatggcggctgtgagggccctggtggcctcgaggctcgctgcggcatctgcattcacgtccctgtcccccggcggtcggacgccttcccagcgcgcagcccttcacctctccgtgccgcgccccgcggccagggtcgcgctggtgctgtctggatgcggagtctacgatgggaccgagatccacgaggcctcggcgatcctggtgcacctgagccgtggaggggctgaagtccagatctttgctcctgacgtccctcagatgcacgtgattgaccacaccaaggggcagccgtccgaaggcgagagcaggaatgttttgaccgagtctgcgaggatcgcccgtggcaaaatcacagacctggccaacctcagtgcagccaaccatgatgctgccatctttccaggaggctttggagcggctaaaaacctgagcacgtttgccgtggacgggaaagattgcaaggtgaataaagaagtggagcgtgtcctgaaggagttccaccaggccgggaagcccatcggcttgtgctgcattgcacctgtcctcgcggccaaggtgctcagaggcgtcgaggtgactgtgggccacgagcaggaggaaggtggcaagtggccttatgccgggaccgcagaggccatcaaggccctgggtgccaagcactgcgtgaaggaagtggtcgaagctcacgtggaccagaaaaacaaggtggtcacgaccccagccttcatgtgcgagacggcactccactacatccatgatgggatcggagccatggtgaggaaggtgctggaactcactggaaagtgacgcgcatggacggggcccagctaggcgccaggacttggcctcaccctctggctgaggagctgtcggctgctttccatccagctgggagtctggcaggcccttttttttttttctttgccgaaacctgcaggcgttctctctctaaggaggatgtgctgcagtgcatgggggatgtttcttcctgggtgtggctgggctgctctcacatacagaggccgaggggccaattcgttctctgccacagggacttgcctcactgtgtcccaaaaacaaatcgcagccagcttttccagaaatagaaaattctgccgtctgaggttttatacttcaggttagttagtttttggaaggaagaacatttttaggtttgcaagcctcctgatcaggaaaccagaaataccacatttatggaccatgaaaggttggttcttgactctgaagggacttttgagttaatcagcgtaaggggatttctaaagcaggcaatccctgtagccgcagagaataaacgccttcccaaaatggcaacttcccacagccacatttcagacctgctgagactgctgagtgaggaatggcagtgaggtttcttcaattagtctcagttctcttaattttcaggaagaaagggaaattgcagctcctcagcccccaggattgacctctggggagtgatggtagcgttggtgccaggccgtgggttcaggtgtggcagaagcttgcagatgcgtccgaagggaaataaagtgtgttggcgttag

SEQ ID NO: 409 - DNA, 1399 bp, Homo sapiens
ttgccggcgcaagagccaagccgccagcgctgctatgtgggccacgctgccgctgctctgcgccggggcctggctcctgggagtccccgtctgcggtgccgccgaactgtccgtgaactccttagagaagtttcacttcaagtcatggatgtctaagcaccgtaagacctacagtacggaggagtaccaccacaggctgcagacgtttgccagcaactggaggaagataaacgcccacaacaatgggaaccacacatttaaaatggcactgaaccaattttcagacatgagctttgctgaaataaaacacaagtatctctggtcagagcctcagaattgctcagccaccaaaagtaactaccttcgaggtactggtccctacccaccttccgtggactggcggaaaaaaggaaattttgtctcacctgtgaaaaatcagggtgcctgcggcagttgctggactttctccaccactggggccctggagtctgcaatcgccatcgcaaccggaaagatgctgtccttggcggaacagcagctggtggactgcgcccaggacttcaataattacggctgccaagggggtctccccagccaggctttcgagtatatcctgtacaacaaggggatcatgggtgaagacacctacccctaccagggcaaggatggttattgcaagttccaacctggaaaggccatcggctttgtcaaggatgtagccaacatcacaatctatgacgaggaagcgatggtggaggctgtggccctctacaaccctgtgagctttgcctttgaggtgactcaggacttcatgatgtatagaacgggcatctactccagtacttcctgccataaaactccagataaagtaaaccatgcagtactggctgttgggtatggagaaaaaaatgggatcccttactggatcgtgaaaaactcttggggtccccagtggggaatgaacgggtacttcctcatcgagcgcggaaagaacatgtgtggcctggctgcctgcgcctcctaccccatccctctggtgtgagccgtggcagccgcagcgcagactggcggagaaggagaggaacgggcagcctgggcctgggtggaaatcctgccctggaggaagttgtggggagatccactgggacccccaacattctgccctcacctctgtgcccagcctggaaacctacagacaaggaggagttccaccatgagctcacccgtgtctatgacgcaaagatcaccagccatgtgccttagtgtccttcttaacagactcaaaccacatggaccacgaatattctttctgtccagaagggctactttccacatatagagctccagggactgtcttttctgtattcgctgttcaataaacattgagtgagcacctcca

SEQ ID NO: 410 - DNA, 5356 bp, Homo sapiens
cgggattcggctggctctgccacaccaccgcgcgcccccgctccgcccgcccctccgggcgcgtcttttccgggctcgcgctgagtcccgcctccgccggctgtccgggtgcgcgcgcgccgctgcggctttttctctggcctccgccgcgcgctcctcctcgtcccagcgctagcgggcacgcggttcctttttgcgagctttccgagtgccaggcgccggccggctgcgaagacgcggtgggccgcccctccgattgaaatcacagaagatattcgtgttcttcttaagagaaaaagaggacattttagctttctcagttgaaggcgtactttattgtcggcttccaaagattactaacttttatctgtatcactaagattgaactgccttggctgtactgctattcttactgctgcttctattattgccttcttcagcacaataaggctttcaaaagccaaagaataacaagaaataagcaccattttagaagcctttccactatgaaacttaagctaaatgtgctcaccattattttgctgcctgtccacttgttaataacaatatacagtgcccttatatttattccatggtattttcttaccaatgccaagaagaaaaacgctatggcaaagagaataaaagctaagcccacttcagacaaacctggaagtccatatcgctctgtcacacacttcgactcactagctgtaatagacatccctggagcagatactctggataaattatttgaccatgctgtatccaagtttgggaagaaggacagccttgggaccagggaaatcctaagtgaagaaaatgaaatgcagccaaatggaaaagtttttaagaagttaattcttgggaattataaatggatgaactatcttgaagtgaatcgcagagtgaataactttggtagtggactcactgcactgggactaaaaccaaagaacaccattgccatcttctgtgagaccagggccgaatggatgattgcagcacagacctgctttaagtacaactttcctcttgtgactttatatgccacacttggcaaagaagcagtagttcatgggctaaatgaatctgaggcttcctatctgattaccagtgttgaacttctggaaagtaaacttaagactgcattgttagatatcagttgtgttaaacatatcatttatgtggacaataaggctatcaataaagcagagtaccctgaaggatttgagattcacagcatgcaatcagtagaagagttgggatctaacccagaaaacttgggcattcctccaagtagaccaacgccttcagacatggccattgttatgtatactagtggttctactggccgacctaagggagtgatgatgcatcatagcaatttgatagctggaatgacaggccagtgtgaaagaatacctggactgggaccgaaggacacatatattggctacttgcctttggctcatgtgctagaactgacagcagagatatcttgctttacctatggctgcaggattggatattcttctccgcttacactctctgaccagtccagcaaaattaaaaaaggaagcaaaggagactgtactgtactgaagcccacacttatggctgctgttccggaaatcatggatagaatttataagaatgttatgagcaaagtccaagagatgaattatattcagaaaactctgttcaagatagggtatgattacaaattggaacagatcaaaaagggatatgatgcacctctttgcaatctgttactgtttaaaaaggtcaaggccctgctgggagggaatgtccgcatgatgctgtctggaggggccccgctatctcctcagacacaccgattcatgaatgtctgcttctgctgcccaattggccagggttatggactgacagaatcatgtggtgctgggacagttactgaagtaactgactatactactggcagagttggagcacctcttatttgctgtgaaattaagctaaaagactggcaagaaggcggttatacaattaatgacaagccaaaccccagaggtgaaatcgtaattggtggacagaacatctccatgggatattttaaaaatgaagagaaaacagcagaagattattctgtggatgaaaatggacaaaggtggttttgcactggtgatattggagaattccatcccgatggatgtttacagattatagatcgtaagaaagatctagtgaagttacaagcaggagagtatgtatctcttgggaaagtagaagctgcactgaagaattgtccacttattgacaacatctgtgcttttgccaaaagtgatcagtcctatgtgatcagttttgtggttcctaaccagaaaaggttgacacttttggcacaacagaaaggggtagaaggaacttgggttgatatctgcaataatcctgctatggaagctgaaatactgaaagaaattcgagaagctgcaaatgccatgaaattggagcgatttgaaattccaatcaaggttcgattaagcccagagccatggacccctgaaactggtttggtaactgatgctttcaaactgaaaaggaaggagctgaggaaccattacctcaaagacattgaacgaatgtatgggggcaaataaaatgttgttgtcttattgacagttgtgcaggaggtagcctggtggttttcaacctctagaattttaagcctttgttgaactgttagaatgtaaggtatatcattctaaagatagagtaaaaagaaaacaaaaccaaaagttattaaaattgttgtccggtttactttaacttagttttgcatagttctagtgcagctgaaattgaaaagttatttccctttagctgtgttattatagagcagaaattctgtttttaaaaattagcctaagatatacttgtttttgtaaagaaaaatatttaatgttgaacaaaataaattggagttggagtagaatgtagtttgaggaaatttgcagcttccaatgcctcttgtcttcctatttcagaagtttaaatattaagcatgacagaaaatatgtattaacactactcaaagcaaaagtgctgcagggctttaaaattctcttccaaccatttatcttgaaggaaaaattcaatagtaatataatacacaaaatcaaataataccttagaaggtattaagattataattgttgcataggttagatatagagtcattgtaatgttgtgaataattacagtgcctaaaataagaatagaacaacatatacaacaccaaaaaatatctagtaatatatttaaagggaaattgagctgctttttttgaaactttgagatctaaaaataactgtaattatttgaatgactaagaggaaagtacattttttgaaatgctgaaaattgcctttctgtgtttattcaaactgaaaagctgagaccaagagcaaggaaggtaaaaagttaacaggcaaacattttctcttagaaaaggtgataaaatcataagtatttggaattagaacccttgcacagcactgaacctgggaaagagatttaaactctgaatttatctttgataacagggattgattttaaaatgtacatgtattaaattacatttgtaatttaaggtctgtttgctgttgctgattttattcttgatcagtagtttgcatttcagaaagcctttcattttgctttaagtttagcaaagcggggttataatgaatgacttccccaatatcttgcttgaacttacagtgattaacttggatgagttttgggaagttaaagggaagaaaacactgttatcattttttcctgtttgggaagagcttagaaactggaaatactagatttgggagaagggcagagttacttgataagggacttgatgtttgtgcagtaacttgggagtgtggtttctttttgaatctttaattaaaacctgggattatatatccctgataaatattcacacttgaaccatagttactgtaaaatgcaaaaaatcttaatactgttattctttgcactttttcttaatcattttttatatatatgcatatatatatgtgtgtgtgtgtgttgcttatgttgttttgtacagatgtgggccaccattgcaacaaaatacattctttttgctctaaaatatttatgaagaaaatacttaaatgttatgtatatggtggtaataagggaaaaatcaagtattataaacaagaatgaaggtttttgtaaagatttctgttcagcgttttgcaaggtaaaattttaggcaagttttccctgaagttatgtgtatgtgagtattctcattcttcccaacttgcctttgaagagtgaaataccattattatcaagtagactactgttcagcttttattccttccctggttgtttatcccttaggaatgagtttcttagactttcccaatatgtgattttttttcccatttagaatggtgattttaaatgtgtgagtgcatgtactatcttatctcagatatttgcacccccaatctgcccccaactcccaaaagctagaacactgccaactgatctgttataggtcctttagaaacacataattaacacttaaggttgggtgctgctaattctttgcaaaaatccaaatattgttaagggaccagggagatgccactaccccttgattttccatctaaaaatatacatgtttatgtaaacaaatctttccatatccatagtgacttttcaagtatttaagcctaaagattttgatctcacatttttatacctgtttaaattgctcacagttattacatacacatcagccatcaactaaagttgtactttaaaaatttactacaatatgtacatttctaagtcaaacacttgtgacttttgctttaattccatgaatgttcctgcctccttgatatttgtatttattctttttttctctagagtagaggtataattgtgtgatatttcagaaatacagataaatgattcaaaaagtcacagttaaggagaatcatgtttctttgatcatgaataactgattagtaagtcttgcctatattttcctgatagcatatgacaaatgtttctaaggtaacaagatgagaacagataaagattgtgtggtgttttggatttggagagaaatattttaatttttaaatgcagttacaaattataatgtattcatatttgtactttctgttaaaatgcatgattgcagaattgtttagattttgtgtttattcttgatgaaaagctttgtttgttcttgtttttaagtttgcactcaaatcttaagaaataaatccacccatgttatcaaaaaaaaaaaaaaaaaaaa

SEQ ID NO: 411 - DNA, 3900 bp, Homo sapiens
cgatggccctgcccagtcccagacagaacctactacgtgcggcggcagctggggcgggaaggcgggcgctgggggcgctgcggccgctgcagcgcagggtccacctggtcggctgcacctgtggaggaggaggtggatttcaggcttcccgtagactggaagaatcggctcaaaaccgcttgcctcgcaggggctgagctggaggcagcgaggccgcccgacgcaggcttccggcgagacatggcagggcaaggatggcagcccggcggcagggcccggcgaggagcgcgaacccgcggccgcagttcccaggcgtctgcgggcgcgagcacgccgcgaccctgcgtgcgccggggcgggggggcggggcctcgcctgcacaaatagggacgagggggcggggcggccacaatttcgcgccaaacttgaccgcgcgttctgctgtaacgagcgggctcggaggtcctcccgctgctgtcatggttggttcgctaaactgcatcgtcgctgtgtcccagaacatgggcatcggcaagaacggggacctgccctggccaccgctcaggaatgaattcagatatttccagagaatgaccacaacctcttcagtagaaggtaaacagaatctggtgattatgggtaagaagacctggttctccattcctgagaagaatcgacctttaaagggtagaattaatttagttctcagcagagaactcaaggaacctccacaaggagctcattttctttccagaagtctagatgatgccttaaaacttactgaacaaccagaattagcaaataaagtagacatggtctggatagttggtggcagttctgtttataaggaagccatgaatcacccaggccatcttaaactatttgtgacaaggatcatgcaagactttgaaagtgacacgttttttccagaaattgatttggagaaatataaacttctgccagaatacccaggtgttctctctgatgtccaggaggagaaaggcattaagtacaaatttgaagtatatgagaagaatgattaatatgaaggtgttttctagtttaagttgttccccctccctctgaaaaaagtatgtatttttacattagaaaaggttttttgttgactttagatctataattatttctaagcaacttgtttttattccccactactcttctctctatcagataccatttatgagacattcttgctataactaagtgcttctccaagaccccaactgagtccccagcacctgctacagtgagctgccattccacacccatcacatgtggcactcttgccagtccttgacattgtcgggcttttcacatgttggtaatatttattaaagatgaagatccacatacccttcaactgagcagtttcactagtggaaataccaaaagcttcctacgtgtatatccagaggtttgtagataaatgttgccaccttgtttgtaacagtgaaaaattgaaaacaacctggaagtccagtgatgggaaaatgagtatgtttctgtcttagattggggaacccaaagcagattgcaagactgaaatttcagtgaaagcagtgtatttgctaggtcataccagaaatcatcaattgaggtacggagaaactgaactgagaaggtaagaaaagcaatttaaagtcagcgagcaggttctcattgataacaagctccatactgctgagatacagggaaatggaggggggaaagctggagtattgatcccgcccccctccttggttgtcagctccctgtcctgtgtgtgggcggaacatagtccagctgctctatagcaagtctcaggtgtttgcagtaagaagctgctggcatgcacgggaacagtgaatgccaaacacttaaagcaattcgatgtttaagtatgtaagttcttttttttttagacagcgtttcgctcttgttgcccaggctagcatgcaatggtgtgacctcggcttactgcaacctccgccttcccagattcaagcgattctcctgcctcaggctcccaagtagctaggaccaggtgcgcgccaccacgcccggctaatttttgtattttgtatttttagtagagatggggtttcaccatgttggtcaggctagtctcgaactcgtgaccgcaagcgattcacccacctcagcctcccaaagtgctgggattaccggcttgagccaccacacccggcacatcttcattctttttatgtagtaaaaagtataaggccacacatggtttatttgaagtattttataatttaaaaaaatacagaagcaggaaaaccaattataagttcaagtgagggatgatggttgcttgaaccaaagggttgcatgtagtaagaaattgtgatttaagatatattttaaagttataagtagcaggatattctgatggagtttgactttggttttgggcccagggagtttcagatgcctttgagaaatgaatgaagtagagagaaaataaaagaaaaaccagccaggcacagtggctcacacctgtaatcccagcgctttgggaggctaaggcaggcagatcacttgagaccagcttgggcaacatggcaaagccccatctctacaaaaaacacaaaaattagctgggcattgtggcgcacacctgtattcccatctagtcaggaagctgagatggaagaattaattgagcccacgagttcaaggctgcagtgagtcgtgattgtgccactgcactccagccggggtgacagaagagaccttgtctcgaaaacgaatctgaaaacaatggaaccatgccttcataattctagaaagttattttcaactgataaatctatattcacccaaataatcaagggtgaaggtaaaataatacatttttagacaagcaaagactcaggggttacctccatgtgccctttttagggaagctgttggagaaaatactccagcaaaatgaaggagtacacaaaccagagaatgacatgaatccagcaaataggatccaacacaggcaatattccagctatggagctagctttaaaaaggaacagtaaaaatattaatcggttagctgggtggaatggcccatgcctgtagtcccagctactcaggaggctcagcagcaggacgacttgagcccaagagttccagaccagcctggccaccttagtgagatcccttctcttaaaaataataacttattgccagatttggggcatttggaaagaagttcattgaagataaagcaaaagtaaaaaaaaaaaaaaaaaaaacaaggggaaagggttggttaggcaatcattctagggcagaaagaagtacaggataggaagagcataatacactgtttttctcaacaaggagcagtatgtacacagtcataatgatgtgactgcttagcccctaaatatggtaactactctgggacaatatgggaggaaaagtgaagattgtgatggtgtaagagctaatcctcatctgtcatatccagaaatcactatataatatataataatgaaatgactaagttatgtgaggaaaaaaacagaagacattgctaaaagagttaaaagtcattgctctggagaattaggagggatggggcaggggactgttaggatgcattataaactgaaaagcctttttaaaattttatgtattaatatatgcattcacttgaaaaactaaaaaaaaacaataatttggaaaaacccatgaaggtaactaacggaaggaaaaactaagagaatgaaaagtatttgcctctggaaagaacaactggcaggactgttgttttcattgtaagacttttggagccatttaattgtacttaaccattttcatctatttctttaataagaacaattccatcttaataaagagttacacttgttaata

SEQ ID NO: 412 - DNA, 2914 bp, Homo sapiens
  modified_base (28)..(29): a, c, g, or t
  modified_base (771)..(771): a, c, g, or t
  modified_base (2072)..(2072): a, c, g, or t
  modified_base (2200)..(2200): a, c, g, or t
  modified_base (2708)..(2709): a, c, g, or t
  modified_base (2712)..(2712): a, c, g, or t
  modified_base (2714)..(2715): a, c, g, or t
  modified_base (2727)..(2736): a, c, g, or t
  modified_base (2874)..(2874): a, c, g, or t
gctgcggcccgaggacgcgacgcgagcnnagttccggcgaggaggccgcgccagtgacagcgatggcggcggagtcggcgctccaagttgtggagaagctgcaggcgcgcctggccgcgaacccggaccctaagaagctattgaaatatttgaagaaactctccaccctgcctattacagtagacattcttgcggagactggggttgggaaaacagtaaatagcttgcgaaaacacgagcatgttggaagctttgccagggacctagtggcccagtggaagaagctggttcctgtggaacgaaatgctgagcctgatgaacaggactttgagaagagcaattcccgaaagcgccctcgggatgccctgcagaaggaggaggagatggagggggactaccaagaaacctggaaagccacggggagccgatcctatagccctgaccacaggcagaagaaacataggaaactctcggagctcgagagacctcacaaagtgtctcacggtcatgagaggagagatgagagaaagaggtgtcacagaatgtcaccaacttactcttcagaccctgagtcttctgattatggccatgttcaatcccctccatcttgtaccagtcctcatcagatgtacgtcgaccactacagatccctggaggaggaccaggagcccattgtttcacaccagaagcctgggaaaggccacagcaatgcctttcaggacagactcggggccagccaagaacgacacctgggtgaaccccatgggaaanggggttgtgagtcaaaacaaggagcacaaatcttcccacaaggacaaacgccccgtggatgccaagagtgatgagaaggcctctgtggtgagcagagagaaatcacacaaggccctctccaaagaggagaaccgaaggccaccctcaggggacaatgcaagggagaaaccgccctctagtggcgtaaagaaagagaaggacagagagggcagcagcctgaagaagaagtgtttgcctccctcagaggccgcttcagacaaccacctgaaaaagccaaagcacagagacccagagaaagccaaattggacaaaagcaagcaaggtctggacagctttgacacaggaaaaggagcaggagacctgttgcccaaggtaaaagagaagggttctaacaacctaaagactccagaagggaaagtcaaaactaatttggatagaaagtcactgggctccctccctaaagttgaggagacagatatggaggatgaattcgagcagccaaccatgtcttttgaatcctacctcagctatgaccagccccggaagaaaaagaaaaagattgtgaaaacttcagccacggcacttggagataaaggacttaaaaaaaatgactctaaaagcactggtaaaaacttggactcagttcagaaattacccaaggtgaacaaaaccaagtcagagaagccggctggagctgatttagccaagctgagaaaggtgcctgatgtgttgccagtgttgccagacctcccgttacccgcgatacaggccaattaccgtccactgccttccctcgagctgatatcctccttccagccaaagcgaaaagcgttctcttcaccccaggaagaagaagaagctggatttactgggcgcagaatgaattccaagatgcaggtgtattctggttccaagtgtgcctatctccctaaaatgatgaccttgcaccagcaatgcatccgagtacttaaaaacaacatcgattcaatctttgaagtgggaggagtcccatactctgttcttgaacccgttttggagaggtgtacacctgatcagctgtatcgcatagaggaatacaatcatgtattaattgaagaaacagatcaattatggaaagttcattgtcaccgagactttaaggaagaaagacccgaagagtatgagtcgtggcgagagatgtacctgcggcttcaggacgcccgagagcagcggctacgagtactaacaaagaatatccagttcgcacatgccaataagcccaaaggccgacaagcaaagatggcctttgtcaactctgtggnccaagccacctcgtgacgtccggaggaggcaggaaaagtttggaacgggaggagcagctgtccctgagaaaatcaagatcaagccagccccgtaccccatgggaagcagccatgcttccgccagtagnatcagctttaaccccagccctgaggagccggcctatgatggcccaagcaccagcagtgcccacttggcaccagtggtcagcagcactgtttcctatgatcctaggaaacccactgtgaagaaaattgccccaatgatggccaagacaattaaagctttcaagaacagattctcccgacgataaactgaggacttgccttggaaatggaatctggggaggcaggaatacaaggacagtgggggttggggaatggaattctacaggagactggagtcttgctttgtggatccttttggtctccgagtcctgcagtctgcaggtgctgcccctgggaacctgcgtgccacagccccgcctccctgcctggagcacactttagaattctgaagatgtgaagcctctgtctcactgaggattttaaaggtcaattatacttttgttgttcattagcatctttgtaaactataagacgtagttttaattaataaatattgcccccagattgtanntanannaaaaaaaaaaannnnnnnnnntttttgtcctctaccacacatttagccttttatcttccaggtccttattaaaatcagatgaaagcctagtgaaagccagtcttctgccccagctcagctctgtgtggactctggtccagacagaggactgggcatctncagacctgcacagtacctgctgacgtagggcaaggaatga

SEQ ID NO: 413 - DNA, 1276 bp, Homo sapiens
ctccctggttccgcgttctggttccgccatggaatccaacaaggatgaagctgagcgctgtatcagcatcgccctcaaggccatccagagcaaccagcccgaccgggcgctccgcttcctggagaaggcacagcggctgtatccgacgccgcgagttcgcgccctgattgagtccctcaaccagaaaccacagactgccggtgaccaacccccacccacagacacaacccatgcctcccacaggaaagcaggtgggaccgatgccccctcggccaacggtgaagctggaggagagagcaccaaaggctacactgcagaacaggttgcagctgtgaaaagggtcaagcaatgtaaagattactatgagatcctgggggtgagcagaggggcctcggatgaggacctgaagaaggcctaccgcagactggccctcaaattccacccagacaagaaccacgcacctggtgccactgaagccttcaaagccattggcacagcatatgcggtactcagcaacccggagaagaggaagcagtatgaccagttcggcgatgacaagagccaggcggcccggcacggccatgggcatggggatttccaccgtggctttgaggccgacatctcccctgaagacctcttcaacatgttctttggcggcggctccccttctagtaacgtccacgtctacagcaacggccgcatgcgctatacctaccagcaaaggcaggaccgcagggacaaccagggtgatggcgggctaggggtgtttgtgcagctgatgcctatcctcatcctgattctcgtgtcagctctcagccagctcatggtctccagtccaccctacagtctgagtccaagaccgtccgtgggccacatccacaggcgagtcactgaccacctgggtgtcgtctactatgtgggagacactttctccgaagagtacacaggctccagcctcaaaacagtcgagcggaatgtggaagatgattatatcgccaacctccggaacaactgctggaaggagaagcagcagaaggaaggcttgctgtaccgggcacgctactttggcgacacagatatgtaccacagagcacagaagatgggcacccccagctgcagccgactgtcagaggtgcaggcctccctgcatggatagtcctgggccagccacaccaccgaggtccaaactatgaaatccctggagaatttttggtgacatgcactgagccaaggtgatggactgtatatttgaggaaagacaaacaaagaaacaaaa

SEQ ID NO: 414 - DNA, 5875 bp, Homo sapiens
  modified_base (988)..(988): a, c, g, or t
  modified_base (990)..(991): a, c, g, or t
  modified_base (995)..(995): a, c, g, or t
  modified_base (997)..(1000): a, c, g, or t
  modified_base (1003)..(1011): a, c, g, or t
  modified_base (1066)..(1066): a, c, g, or t
  modified_base (1321)..(1321): a, c, g, or t
  modified_base (1335)..(1335): a, c, g, or t
  modified_base (3534)..(3534): a, c, g, or t
  modified_base (3990)..(3990): a, c, g, or t
  modified_base (4407)..(4407): a, c, g, or t
  modified_base (4674)..(4674): a, c, g, or t
  modified_base (4790)..(4790): a, c, g, or t
  modified_base (4858)..(4858): a, c, g, or t
  modified_base (4975)..(4975): a, c, g, or t
  modified_base (5250)..(5250): a, c, g, or t
  modified_base (5253)..(5253): a, c, g, or t
  modified_base (5255)..(5257): a, c, g, or t
  modified_base (5259)..(5259): a, c, g, or t
  modified_base (5262)..(5262): a, c, g, or t
  modified_base (5689)..(5689): a, c, g, or t
ggacaggcgtggcggccggagccccagcatccctgcttgaggtccaggagcggagcccgcggccaccgccgcctgatcagcgcgaccccggcccgcgcccgccccgcccggcaagatgctgcccgtgtaccaggaggtgaagcccaacccgctgcaggacgcgaacatctgctcacgcgtgttcttctggtggctcaatcccttgtttaaaattggccataaacggagattagaggaagatgatatgtattcagtgctgccagaagaccgctcacagcaccttggagaggagttgcaagggttctgggataaagaagttttaagagctgagaatgacgcacagaagccttctttaacaagagcaatcataaagtgttactggaaatcttatttagttttgggaatttttacgttaattgaggaaagtgccaaagtaatccagcccatatttttgggaaaaattattaattattttgaaaattatgatcccatggattctgtggctttgaacacagcgtacgcctatgccacggtgctgactttttgcacgctcattttggctatactgcatcacttatatttttatcacgttcagtgtgctgggatgaggttacgagtagccatgtgccatatgatttatcggaaggcacttcgtcttagtaacatggccatggggaagacaaccacaggccagatagtcaatctgctgtccaatgatgtgaacaagtttgatcaggtgacagtgttcttacacttcctgtgggcaggaccactgcaggcgatcgcagtgactgccctactctggatggagataggaatatcgtgccttgctgggatggcagttctaatcattctcctgcccttgcaaagctgttttgggaagttgttctcatcactgaggagtaaaactgcaactttcacggatgccaggatcaggaccatgaatgaagttataactggtataaggataataaaaatgtacgcctgngnnaagncnnnntcnnnnnnnnntaccaatttgagaaagaaggagatttccaagattctgagaagttcctgcctcagngggatgaatttggcttcgtttttcagtgcaagcaaaatcatcgtgtttgtgaccttcaccacctacgtgctcctcggcagtgtgatcacagccagccgcgtgttcgtggcagtgacgctgtatggggctgtgcggctgacggttaccctcttcttcccctcagccattgagagggtgtcagaggcaatcgtcagcatccgaagaatccagacctttttgctacttgatgagatatcacagcgcaaccgtcagctngccgtcagatggtnaaaaagatggtgcatgtgcaggattttactgctttttgggataaggcatcagagaccccaactctacaaggcctttcctttactgtcagacctggcgaattgttagctgtggtcggccccgtgggagcagggaagtcatcactgttaagtgccgtgctcggggaattggccccaagtcacgggctggtcagcgtgcatggaagaattgcctatgtgtctcagcagccctgggtgttctcgggaactctgaggagtaatattttatttgggaagaaatatgaaaaggaacgatatgaaaaagtcataaaggcttgtgctctgaaaaaggatttacagctgttggaggatggtgatctgactgtgataggagatcggggaaccacgctgagtggagggcagaaagcacgggtaaaccttgcaagagcagtgtatcaagatgctgacatctatctcctggacgatcctctcagtgcagtagatgcggaagttagcagacacttgttcgaactgtgtatttgtcaaattttgcatgagaagatcacaattttagtgactcatcagttgcagtacctcaaagctgcaagtcagattctgatattgaaagatggtaaaatggtgcagaaggggacttacactgagttcctaaaatctggtatagattttggctcccttttaaagaaggataatgaggaaagtgaacaacctccagttccaggaactcccacactaaggaatcgtaccttctcagagtcttcggtttggtctcaacaatcttctagaccctccttgaaagatggtgctctggagagccaagatacagagaatgtcccagttacactatcagaggagaaccgttctgaaggaaaagttggttttcaggcctataagaattacttcagagctggtgctcactggattgtcttcattttccttattctcctaaacactgcagctcaggttgcctatgtgcttcaagattggtggctttcatactgggcaaacaaacaaagtatgctaaatgtcactgtaaatggaggaggaaatgtaaccgagaagctagatcttaactggtacttaggaatttattcaggtttaactgtagctaccgttctttttggcatagcaagatctctattggtattctacgtccttgttaactcttcacaaactttgcacaacaaaatgtttgagtcaattctgaaagctccggtattattctttgatagaaatccaataggaagaattttaaatcgtttctccaaagacattggacacttggatgatttgctgccgctgacgtttttagatttcatccagacattgctacaagtggttggtgtggtctctgtggctgtggccgtgattccttggatcgcaatacccttggttccccttggaatcattttcatttttcttcggcgatattttttggaaacgtcaagagatgtgaagcgcctggaatctacaactcggagtccagtgttttcccacttgtcatcttctctccaggggctctggaccatccgggcatacaaagcagaagagaggtgtcaggaactgtttgatgcacaccaggatttacattcagaggcttggttcttgtttttgacaacgtcccgctggttcgccgtccgtctggatgccatctgtgccatgtttgtcatcatcgttgcctttgggtccctgattctggcaaaaactctggatgccgggcaggttggtttggcactgtcctatgccctcacgctcatggggatgtttcagtggtgtgttcgacaaagtgctgaagttgagaatatgatgatctcagtagaaagggtcattgaatacacagaccttgaaaaagaagcaccttgggaatatcagaaacgcccaccaccagcctggccccatgaaggagtgataatctttgacaatgtgaacttcatgtacagtccaggtgggcctctggtactgaagcatctgacagcactcattaaatcacaagaaaaggttggcattgtgggaagaaccggagctggaaaaagttccctcatctcagccctttttagattgtcagaacccgaaggtaaaatttggattgataagatcttgacaactgaaattggacttcacgatttaaggaagaaaatgtcaatcatacctcaggaacctgttttgttcactggaacaatgaggaaaaacctggatccctttaangagcacacggatgaggaactgtggaatgccttacaagaggtacaacttaaagaaaccattgaagatcttcctggtaaaatggatactgaattagcagaatcaggatccaattttagtgttggacaaagacaactggtgtgccttgccagggcaattctcaggaaaaatcagatattgattattgatgaagcgacggcaaatgtggatccaagaactgatgagttaatacaaaaaaaaatccgggagaaatttgcccactgcaccgtgctaaccattgcacacagattgaacaccattattgacagcgacaagataatggttttagattcaggaagactgaaagaatatgatgagccgtatgttttgctgcaaaataaagagagcctattttacaagatggtgcaacaactgggcaaggcagaagccgctgccctcactgaaacagcaaaacaggtnatacttcaaaagaaattatccacatattggtcacactgaccacatggttacaaacacttccaatggacagccctcgaccttaactattttcgagacagcactgtgaatccaaccaaaatgtcaagtccgttccgaaggcattttccactagtttttggactatgtaaaccacattgtacttttttttactttggcaacaaatatttatacatacaagatgctagttcatttgaatatttctcccaacttatccaaggatctccagctctaacaaaatggtttatttttatttaaatgtcaatagttgttttttaaaatccaaatcagaggtgcaggccaccagttaaatgccgtctatcaggttttgtgccttaagagactacagagtcaaagctcatttttaaaggagtaggacanagttgtcacaggtttttgttgttgtttttattgcccccaaaattacatgttaatttccatttatatcagggattctatttacttgaagactgtgaagttgccattttgtctcattgttttctttgacataactaggatccattatttcccctgaaggcttcttgttagaaaatagtacagttacaaccaataggaacaacaaaaagaaaaagtttgtgacattgtagtagggagtgtgtaccccttactccccatcaaaaaaaaaantggatacatggttaaaggatagaagggcaatattttatcatatgttctaaaagagaaggaagagaaaatactactttctcaaaatggaagcccttaaaggtgctttgatactgaangacacaaatgtgaccgtccatcctcctttagagttgcatgacttggacacggtaactgttgcagtttnagactcagcattgtgacacttcccaagaaggccaaacctctaaccgacattcctgaaatacgtggcattattcttttttggatttctcatttatggaaggctaaccctctgttgacngtaagccttttggtttgggctgtattgaaatcctttctaaattgcatgaataggctctgctaacgtgatgagacaaactgaaaattattgcaagcattgactataattatgcagtacgttctcaggatgcatccaggggttcattttcatgagcctgtccaggttagtttactcctgaccactaatagcattgtcatttgggctttctgttgaatgaatcaacaaaccacaatacttcctgggaccttttgtactttatttgaactatgagtctntantnnntnctngatgatggtggctgtaatatgttgagttcagtttactaaaggttttactattatggtttgaagtggagtctcatgacctctcagaataaggtgtcacctccctgaaattgcatatatgtatatagacatgcacacgtgtgcatttgtttgtatacatatatttgtccttcgtatagcaagttttttgctcatcagcagagagcaacagatgttttattgagtgaagccttaaaaagcacacaccacacacagctaactgccaaaatacattgaccgtagtagctgttcaactcctagtacttagaaatacacgtatggttaatgttcagtccaacaaaccacacacagtaaatgtttattaatagtcatggttcgtattttaggtgactgaaattgcaacagtgatcataatgaggtttgttaaaangatagctatattcaaaatgtctatatgtttatttggacttttgaggttaaagacagtcatataaacgtcctgtttctgttttaatgttatcatagaattttttaatgaaactaaattcaattgaaataaatgatagttttcatctccaaaaaaaaaaaaaaaaaaaaaaaaaaaaaaaaaaaaaaa

SEQ ID NO: 415 - DNA, 1562 bp, Homo sapiens
ctggaattcggggcgccgagcaggagcagggaacaaaggagcggagaggggaggggagagagttgggcgagggagagcccccggccggctgccagaagatcctggcgggaggaagcccaagtgtcacttgaattccacccaaggagcgggcgcctgggatcagagcgtcctgtttagcaataacggctggagcacgtcctacaagttacgggagagtcggctgtgaaggagacgttcgcttatcccctgtgtccccgctcctggcccctccagacccccgccttgcctcgcgctgggaggggagatccagaatgaaaggcaagaaaggtattgttgcagcatctggcagtgagactgaggatgaggacagcatggacattcccttggacctttcttcatccgctggctcaggcaagagaaggagaaggggcaacctacccaaggagtctgtgcagattcttcgggattggctgtatgagcaccgttacaatgcctatccttcagagcaagaaaaagcgttgctgtcccagcaaacacacctgtctacgctacaggtctgtaactggttcatcaacgcccgccgcaggctcctccctgacatgctgagaaaggatggcaaagatccaaatcagttcacaatttcccgccgtggggccaagatttctgaaacgagctctgtggagtccgtgatgggcatcaaaaacttcatgccagctctagaggagaccccatttcattcctgtacagctgggccaaacccaaccctagggaggccactgtctcctaagccgtcatccccgggatcagttttggctcgtccatcagtgatctgccataccactgtgactgcattgaaagatgtccctttctctctctgccagtcggtcggtgtgggacaaaacacagatatacagcagatagcggccaaaaacttcacagacacctctctcatgtacccagaggacacttgtaaatctggaccaagtacgaatacacagagtggtcttttcaacactcctccccctactccaccggacctcaaccaggacttcagtggatttcagcttctagtggatgttgcactcaaacgggctgcagagatggagcttcaggcaaaacttacagcttaacccattttcaagcaaaacagttctcagaaatgtcatgattgccggggtgaaggcaagagatgaattgcattattttatatattttttattaatatttgcacatgggattgctaaaacagcttcctgttactgagatgtcttcaatggaatacagtcattccaagaactataaacttaaagctactgtagaaacaaagggttttcttttttaaatgtttcttggtagattattcataatgtgagatggttcccaatatcatgtgatttttttttttcctccccttccctttttttgttattttttcagactgtgcaatacttagagaacctatagcatcttctcattcccatgtggaacaggatgcccacatactgtctaattaataaattttccattttttttcaaacaagtaaaaaaaaaaaaaaaaaaaa

SEQ ID NO: 416 - DNA, 2648 bp, Homo sapiens
gtgacagaagctgtgggaggagctggaggcttcaccgtggtaatcacagcgccgctgctgccccgccttgcaggtctcaggactgtcatcgcctctgggtgtgagggtactttggccaccgtccccggaaataaccgcgcctgcctctcaagataccccatcctctccacgccgctgccgctgccgccatgcaaggggaggacgccagatacctcaaaaggaaagttaaaggagggaatatagatgtacatccatcagaaaaagcactcattgttcactatgaagtggaagctaccattcttggagaaatgggggaccccatgttgggagaacgaaaagaatgtcaaaaaatcattcgacttaagagtctcaatgccaacacagatataacttccctggcaaggaaggtggttgaagaatgtaaactcattcatccttcaaaactaaatgaggtagaactgctgttgtactatctacagaaccgccgtgattcattgtcaggaaaagagaaaaaagaaaaatcaagcaagcctaaagatccacctccttttgaaggaatggagattgatgaagttgctaacattaatgacatggatgaatatattgagttattatatgaagatattcctgacaaagttcggggttctgctttgatcctgcagcttgctcgaaatcctgataacttggaagaactactattgaatgaaactgcccttggtgcattagcaagggtcctgagagaagactggaagcaaagtgtcgagttagctacaaacataatttacatctttttttgtttctccagcttttctcaatttcatggacttattactcactataaaattggagctctgtgtatgaatattattgatcatgagttaaaaagacatgagctttggcaagaagaactctcaaagaagaagaaagctgttgatgaagaccctgaaaaccaaaccttgagaaaggattatgaaaaaacctttaaaaagtaccaggggcttgtggtaaaacaggaacagctattacgagttgctctttatttgcttctgaatcttgctgaggatactcgtaccgaactgaaaatgaggaacaagaacatagttcacatgttggtgaaagcccttgatcgggacaattttgagctgctaattttagttgtgtcattcttgaagaaactcagcatttttatggagaataaaaatgatatggtggaaatggatattgttgaaaaactggtgaaaatgataccttgtgagcatgaagacctgctgaatatcaccctccgacttttactaaacctatcctttgacacaggactgaggaataagatggtacaagttggactgcttcccaagctcactgcactcctaggcaatgacaactacaaacaaatagcaatgtgtgttctttaccacataagcatggatgaccgctttaaatcaatgtttgcatacactgactgtataccacagttaatgaagatgctgtttgaatgttcagatgaacgaattgacttggaactcatttctttctgcattaatcttgctgctaacaaaagaaatgtacagcttatctgtgaaggaaatgggctgaagatgctcatgaagagggctctgaagtttaaggatccattgctgatgaaaatgattagaaacatttctcagcatgatggaccaactaaaaatctgtttattgattatgttggggaccttgcagcccagatctctaatgatgaagaagaggagttcgtgattgaatgtttgggaactcttgcaaacttgaccattccagacttagactgggaattggttcttaaagaatataagttggttccatacctcaaggataaactaaaaccaggtgctgcagaagatgatcttgttttagaagtggttataatgattggaactgtatccatggatgactcttgtgctgcattgctagccaaatctggcataatccctgcactcattgaattgctaaatgctcaacaagaagatgatgaatttgtgtgtcagataatttatgtcttctaccagatggttttccaccaagccacaagagacgtcataatcaaggaaacacaggctccagcatatctcatagacctaatgcatgataagaataatgaaatccgaaaggtctgtgataatacattagatattatagcggaatatgatgaagaatgggctaagaaaattcagagtgaaaagtttcgctggcataactctcagtggctggagatggtagagagtcgtcagatggatgagagtgagcagtacttgtatggtgatgatcgaattgagccatacattcatgaaggagatattctcgaaagacctgaccttttctacaactcagatggattaattgcctctgaaggagccataagtcccgatttcttcaatgattaccaccttcaaaatggagatgttgttgggcagcattcatttcctggcagccttggaatggatggctttggccaaccagttggcattcttggacgccctgccacagcatatggattccgccctgatgaaccttactactatggctatggatcttgataaagtatctgtttccatgtgtaatctcagcttagaagaaatctgtgtgggttgggttaattttggatctttgcctaataa

SEQ ID NO: 417 - DNA, 704 bp, Homo sapiens
gggcggccacctgtctttgccgcggtgacccttctctcatgaccctgcggtgccttgagccctccgggaatggcggggaagggacgcggagccagtgggggaccgcggggtcggcggaggagccatccccgcaggcggcgcgtctggcgaaggccctgcgggagctcggtcagacaggatggtactggggaagtatgactgttaatgaagccaaagagaaattaaaagaggcaccagaaggaactttcttgattagagatagctcgcattcagactacctactaacaatatctgttaaaacatcagctggaccaactaatcttcgaatcgaataccaagacggaaaattcagattggactctatcatatgtgtcaaatccaagcttaaacaatttgacagtgtggttcatctgatcgactactatgttcagatgtgcaaggataagcggacaggtccagaagccccccggaacggcactgttcacctttatctgaccaaaccgctctacacgtcagcaccatctctgcagcatctctgtaggctcaccattaacaaatgtaccggtgccatctggggactgcctttaccaacaagactaaaagattacttggaagaatataaattccaggtataaatgtttctctttttttaaacatgtctcacatagagtatctccgaatgcagctatgtaaaagagaaccaa

SEQ ID NO: 418 - DNA, 1280 bp, Homo sapiens
tgccgcagcccccgcccgcccgcagagcttttgaaaggcggcgggaggcggcgagcgccatggccagtccgggctgcctgctgtgcgtgctgggcctgctactctgcggggcggcgagcctcgagctgtctagaccccacggcgacaccgccaagaagcccatcatcggaatattaatgcaaaaatgccgtaataaagtcatgaaaaactatggaagatactatattgctgcgtcctatgtaaagtacttggagtctgcaggtgcgagagttgtaccagtaaggctggatcttacagagaaagactatgaaatacttttcaaatctattaatggaatccttttccctggaggaagtgttgacctcagacgctcagattatgctaaagtggccaaaatattttataacttgtccatacagagttttgatgatggagactattttcctgtgtggggcacatgccttggatttgaagagctttcactgctgattagtggagagtgcttattaactgccacagatactgttgacgtggcaatgccgctgaacttcactggaggtcaattgcacagcagaatgttccagaattttcctactgagttgttgctgtcattagcagtagaacctctgactgccaatttccataagtggagcctctccgtgaagaattttacaatgaatgaaaagttaaagaagtttttcaatgtcttaactacaaatacagatggcaagattgagtttatttcaacaatggaaggatataagtatccagtatatggtgtccagtggcatccagagaaagcaccttatgagtggaagaatttggatggcatttcccatgcacctaatgctgtgaaaaccgcattttatttagcagagttttttgttaatgaagctcggaaaaacaaccatcattttaaatctgaatctgaagaggagaaagcattgatttatcagttcagtccaatttatactggaaatatttcttcatttcagcaatgttacatatttgattgaaagtcttcaatttgttaacagagcaaatttgaataattccatgattaaactgttagaataacttgctactcatggcaagattaggaagtcacagattcttttctataatgtgcctggctctgattcttcattatgtatgtgactatttatataacattagataattaaatagtgagacataaatagagtgctttttcatggaaaagccttcttatatctgaagattgaaaaataaatttactgaaatacaaaaaaaaaaaaaaa

SEQ ID NO: 419 - DNA, 577 bp, Homo sapiens
cgcgcttaagtaactagtccgtagttcgagggtgcgccgtgtccttttgcgttggtaccagcggcgacatgacggggtacactccggatgagaaactgcggctgcagcagctgcgagagctgagaaggcgatggctgaaggaccaggagctgagccctcgggagccggtgctgcccccacagaagatggggcctatggagaaattctggaataaatttttggagaataaatccccttggaggaaaatggtccatggggtatacaaaaagagtatctttgttttcactcatgtacttgtacctgtctggattattcattattacatgaagtatcatgtttctgaaaaaccatatggcatagttgaaaagaagtccagaatattccctggtgatacaattctggagactggagaagtaattccaccaatgaaagaatttcctgatcaacatcattaaagattatgtaaaaagttaaaaggcttatgagcctaagtttgttcctatattaccatatttactgaattttctggaaaagtaactttaataaagtttaatctcagaaattgtcaaaaaaaaaa

SEQ ID NO: 420 - DNA, 897 bp, Homo sapiens
agagactgcgagaaggaggtcccccacggcccttcaggatgaaagctgcggtgctgaccttggccgtgctcttcctgacggggagccaggctcggcatttctggcagcaagatgaacccccccagagcccctgggatcgagtgaaggacctggccactgtgtacgtggatgtgctcaaagacagcggcagagactatgtgtcccagtttgaaggctccgccttgggaaaacagctaaacctaaagctccttgacaactgggacagcgtgacctccaccttcagcaagctgcgcgaacagctcggccctgtgacccaggagttctgggataacctggaaaaggagacagagggcctgaggcaggagatgagcaaggatctggaggaggtgaaggccaaggtgcagccctacctggacgacttccagaagaagtggcaggaggagatggagctctaccgccagaaggtggagccgctgcgcgcagagctccaagagggcgcgcgccagaagctgcacgagctgcaagagaagctgagcccactgggcgaggagatgcgcgaccgcgcgcgcgcccatgtggacgcgctgcgcacgcatctggccccctacagcgacgagctgcgccagcgcttggccgcgcgccttgaggctctcaaggagaacggcggcgccagactggccgagtaccacgccaaggccaccgagcatctgagcacgctcagcgagaaggccaagcccgcgctcgaggacctccgccaaggcctgctgcccgtgctggagagcttcaaggtcagcttcctgagcgctctcgaggagtacactaagaagctcaacacccagtgaggcgcccgccgccgccccccttcccggtgctcagaataaacgtttccaaagtggg

SEQ ID NO: 421 - DNA, 4617 bp, Homo sapiens
atccgataggaccaggtagccactgagcatgcctgtctggtgggcatagcctctgtgcctggtggggtccagccctgtatgtggacttcctgggggaccgcctgcatgctgggaaagtcctgcaactgtgggctctgggccggacccctcctccttggggagcgttgctgtggtctccgcagcctgttggtgtggtccgagaggggactggtgtgtggtggtagggacgcaggtgctcaggagggctcctcaggctgcctctctgcctgttactgctgctccctccctggtcctggggactcgctcaggcctggatgtgtggttttggacaccttggaaagaggttagctgtgagttttgctttgattgggctttgagctgctgagctagatctgtccaagcatgcttttgtggttttctcgagtctttggtcaccctgcgtagaattacctttacttttgccttcattttaggtaatcattaccaaatgaggaggaaaggacgatgtcatcgaggctctgcagcgaggcatccttcttccccatgcagtgttaaacactcccctacgcgagaaacgctgacctacgctcaagctcaaaggatggtagagatagaaattgaagggcgcttgcacaggatcagtatttttgatcccctggagatcatattggaagatgacctcactgctcaagagatgagtgagtgcaacagcaacaaggaaaacagcgagcggcctcctgtctgcttaagaactaagcgtcacaaaaacaacagagtcaaaaagaaaaacgaggccctccccagcgcccacggcacgccggcctcggccagtgccctcccggagcccaaggtgcgcatcgtggagtacagccctccgtccgcccccaggaggcctcctgtgtactacaagttcatcgagaagtcggccgaggaactggacaacgaggtggagtatgacatggacgaggaggactatgcctggctggagatcgtcaatgagaagcgcaagggcgactgcgtccccgccgtgtcgcagagcatgtttgagttcctgatggaccgcttcgagaaggagtcgcactgcgagaaccagaagcagggcgagcagcagtctctgatcgacgaggacgccgtgtgctgcatctgcatggacggggagtgtcagaacagcaacgtgatcctcttctgcgacatgtgcaacctggccgtgcaccaggagtgctacggggtgccctacatccccgagggccagtggctctgccgccactgcctgcagtcgcgggcccggcccgccgactgtgtgctgtgccccaacaagggtggtgccttcaaaaagacagatgacgaccgctggggtcacgtggtgtgtgccctgtggatcccagaggtcggctttgccaacacggtgttcatcgagcccatcgatggggtgaggaacatccctccagcccggtggaaactgacatgctacctctgtaagcagaagggcgtgggtgcctgcatccagtgccacaaagcaaactgctacacagcattccatgtgacgtgtgcccagaaggctggcctgtacatgaaaatggagcccgtgaaggaactgactggcggtggcaccaccttctccgtcagaaagaccgcttactgtgatgtccacacgcctccaggctgcacccggaggcctctgaatatttacggggatgtcgaaatgaaaaatggcgtctgtcgaaaagagagctcggttaaaacggtcaggtccacatccaaggtcaggaagaaggcaaaaaaggctaagaaagctctggctgagccctgcgcggtcctgccgaccgtgtgcgctccttatattcccccgcagaggttaaataggattgcgaatcaggtggccattcagcggaagaagcagtttgtggagcgagcccacagctactggctgctcaagcggctgtccaggaacggggcccccctgctgcggcggctgcagtccagcctgcagtctcagcgaagctcacagcagagagaaaatgatgaggagatgaaggctgccaaagagaagctgaagtactggcagcggctgcggcacgacctggagcgcgctcgcctgctgatcgagctgctgcgcaagcgggagaagctcaagcgtgagcaggtgaaggtggagcaggtcgccatggagctgcggctgaccccgctgacggtgctgctgcgctcagtgctggaccagctgcaagacaaggaccccgccaggatatttgcgcagcccgtgagtctgaaggaggtaccagattatttggatcacattaaacatcccatggactttgccacaatgaggaaacggttagaagctcaagggtataaaaacctccatgagtttgaggaggattttgatctcattatagataactgcatgaagtacaatgccagggacaccgtgttctatagagccgcggtgaggctgcgcgatcagggaggtgttgttctgaggcaggcccggcgcgaggtggacagcatcggcttggaagaggcctcggggatgcacctgcctgagcggcctgctgcggcaccgcggcggcctttctcctgggaagacgtggacaggttgctggaccccgccaacagagcccacctgggcctggaggagcagctgagagagctgctggacatgctcgacctcacctgcgctatgaagtccagcggctcccggagcaagcgggcaaagctgctcaaaaaggaaattgcccttctccgaaacaagctgagccagcagcacagccagcccctgcccacggggccaggcttggaaggcttcgaagaggacggagctgcgctggggccggaggcgggcgaggaagtccttccgaggttggagactcttctgcagccaaggaaaaggtcgcggagcacatgcggagactccgaggtggaggaggagtccccaggaaagcgcctggacgcaggtctcaccaacggctttgggggtgcgaggagcgagcaggagccgggcggcggcctggggaggaaggccacaccccgacgacgctgtgcctccgagtccagcatctcctccagcaacagcccgctctgcgactcgagctttaatgcgcccaaatgtgggcggggcaaaccggctcttgtgcgacggcacacgctggaggaccgcagtgagctgatctcctgcatcgagaatgggaactacgccaaggcggccaggatcgcagccgaagtcggccagagcagcatgtggatctccactgatgccgccgcctcggtgctggagcctctgaaggtggtgtgggccaagtgcagcggctacccctcctacccggcactgatcatcgaccccaagatgccccgtgtgcctggccaccacaacggcgtcaccatcccggccccacccctggacgtgctgaagattggggagcacatgcagaccaagtctgatgagaagctgttcctcgttctcttttttgataataagagaagttggcagtggcttcctaagtccaaaatggttccccttggtattgacgaaactatagacaagttaaagatgatggaagggaggaattccagcatccggaaggccgtgcggatcgcttttgaccgcgccatgaaccacctgagccgcgtccacggggagccgaccagcgacctcagtgacattgactgacggcccggccgccagcgcgggtcttgtccatagtgttgataagctgtacatgtttgtatattgttcaaaacttaacttattctgatttttagttatagctctttaattctttttccccggggaggggggaggttttatttccaagttttctaggaacccatctccgtctgggcgctgtgagtggggtgggcacgtccgggcagcccagtgcgtctgtcgcacgtccccaggccgtgctgctggcgtcactttctttgatatgtagctttttcttaaagacttttgaatgtttaataattttgtaaatcatgctctttacacagagtaccacttatttaataagacgggatgtaaatttacaatgacaaatgtgtattttaagaaagaaaatgacattattttgaatggtactttgtggaaagaggggagaataaagttatgctgtgtacatcacttgcagatcaccaaaaacactccgctgcccgtgaccgccggtgggtgtgtccccgctcccgtcgtcccgcccacctcaaaccccgcaggtgtgcctcccagcggattatttattgtagaaagtgtattcatttgctttataatgaaaaatacatttgcaaaggtatattgatatgcatttttatacaggcacataaaaattcaacttggcttgggagcagaatgcattgcattgtataaatgactctggcctgtgtgtactttgattttataacttgtaatcttttgtttacaatgaggggctttctgtaacttgttttaatttagaacactttggtagcaatagaaactttggatacatttttgtatggtacctgtgatgtatatagaattagtactttatttttatttttaagaggtaaagcattatgttggggaaagtagggtgggtttccaaatttgcattttttatattaaaaataaagtcaagaaaaaaaaaa

SEQ ID NO: 422 - DNA, 2707 bp, Homo sapiens; identical to SEQ ID NO: 334

SEQ ID NO: 423 - DNA, 3003 bp, Homo sapiens; identical to SEQ ID NO: 148

SEQ ID NO: 424 - DNA, 2215 bp, Homo sapiens
actcagtagaccgccactggctgtgcacgttatggggtttccacctagggctcggcctgaggcttgtaacactccgttttcccccgagtcacaggggcagtcttgcccctcgcagctgggtcgcggtgtctctcaaaggtccccctctacaggggcttcgtgaggcccgggcccacagggcgctcggtcccggaagtgacgtctcccagaggggccggaagtggcagtggagggagggaagatggcggaggtgggggagataatcgagggctgccgcctacccgtgctgcggcggaaccaggacaacgaagatgagtggcccctggccgagatcctgagcgtgaaggacatcagtggccggaagcttttctacgtccattacattgacttcaacaaacgtctggatgaatgggtgacgcatgagcggctggacctaaagaagatccagttccccaagaaagaggccaagacccccactaagaacggacttcctgggtcccgtcctggctctccagagagagaggtgccggcctcggcgcaggccagcgggaagaccttgccaatcccggtccagatcacactccgcttcaacctgcccaaggagcgggaggccattcccggtggcgagcctgaccagccgctctcctccagctcctgcctgcagcccaaccaccgctcaacgaaacggaaggtggaggtggtttcaccagcaactccagtgcccagcgagacagccccggcctcggtttttccccagaatggagccgcccgtagggcagtggcagcccagccaggacggaagcgaaaatcgaattgtttgggcactgatgaggactcccaggacagctctgatggaataccgtcagcaccacgcatgactggcagcctggtgtctgatcgaagccacgacgacatcgtcacccggatgaagaacattgagtgcattgagctgggccggcaccgcctcaagccgtggtacttctccccgtacccacaggaactcaccacattgcctgtcctctacctgtgcgagttctgcctcaagtacggccgtagtctcaagtgtcttcagcgtcatttgaccaagtgtgacctacgacatcctccaggcaatgagatttaccgcaagggcaccatctccttctttgagattgatggacgtaagaacaagagttattcccagaacctgtgtcttttggccaagtgtttccttgaccataagacactgtactatgacacagaccctttcctcttctacgtcatgacagagtatgactgtaagggcttccacatcgtgggctacttctccaaggagaaagaatcaacggaagactacaatgtggcctgcatcctaaccctgcctccctaccagcgccggggctaccggaagctgctgatcgagttcagctatgaactctccaaagtggaagggaaaacagggacccctgagaagcccctctcagaccttggcctcctatcctatcgaagctactggtcccagaccatcctggagatcctgatggggctgaagtcggagagcggggagaggccacagatcaccatcaatgagattagtgaaatcaccagcatcaagaaggaggatgtcatctccactctgcagtacctcaatctcatcaactactacaagggccagtacatcctcacactgtcagaggacatcgtggatggccatgagcgggccatgctcaagcggctcctgcggatcgactccaagtgtctgcacttcactcccaaggactggagcaagagggggaagtggtgaccagacactgcccactgcagtgccaagacggcagcaggactggggctgatagcccaccccgcccccactgcagctcccacaaagcactctaagggagatggggctgaggacagctcaaaaaggagaggacaggcctgcagggcccacttgcccagcaccaaggcgagctccgggctcagaccaactccaaggtcagctggccacagcccaggcctcctctgaagcagggaccagagggagccaggcagctgtgtacagtgagaagggatccggatgggggagctctgtacagagggctggtgattgtaaaaatttcttttgtaaagtagaagttgggggtggggtgggtgctggctgcaaaaatttctggcttctcttacccctattgcccccggcaataaattgtttctatatgccaaaaaaaaaaaaaaa

SEQ ID NO: 425 - DNA, 1977 bp, Homo sapiens
caaattattattgtctcttaggtttggatattgatgggatatacagagtaagtggcaacctcgcagtgatccagaaactaaggtttgcagtcaatcatggtaagattatatttactgttgttattcagatgcatcactcataactttttgaactggcttaaagtaattttttaaaatgtccaattcctgctgtttttcagatgagaaattggacttgaatgacagtaaatgggaagatattcatgtcattactggagccctcaaaatgttttttcgagaattaccagaacctctttttacatttaatcattttaatgattttgttaatgcaattaagcaagaaccaagacagcgagtcgctgctgttaaggacctaatcagacagttgccaaagccaaaccaagacacaatgcagattcttttccgacatctcagaagagttatagaaaatggagagaaaaatcgaatgacctatcagagtatagcaattgtttttggtcccactctattaaaaccagaaaaagagactggtaatatagcagttcatactgtgtaccagaatcagattgtagaattaattcttctggaactgagttccatcttcggacgttgattcttactgaagacaacctgtggaatagaagctggattccatcagatttcaaatgtttatacacaatgtattttattttttggaccaagcagtgactctttgattttgcactttttttttgagggatcagaagggaaggggagagtcgagatgtgtgttaggccctcatatttgctgctttgttgcaagttgatataactgcgtgtaattatgaattcattttatcctgaatgtttgcatttcatactctgaatttcagtaaaaatcaaaacttaaaattctaaccagtcatatacactggataatttggtaagaaaactgtattttttttccctgaaattggataatgtactttcttctcaagattcatgacttgatagaacaatactttcagttatgttgcaaaggctcttgggcattttaaacaaaatgaagtatatccattttgaaacctgtgtatttctttttcggggtttctgcatgcagtggcagtcttaagtgccaaaattcattataaccccaaaataaccccttgatgaaggcttgctgtcttttactgtgttacacagcatccttactggatatcttagttgcttgtttgggcagcacactaatattacttaaaacactgtgatatactggagttttagttagcggaagtcagttcagggcattttagggctgtcttgctatactgaattgtagctaacaatcctaattatatctagtaccatactgagttattggtatgaccctgtggaaacacacattattttatgtaaatataggctaaagacttaatgtcctttagcttgtgtatataattgtgttgtatagtctcagagtacattctaaccctacatttctaatcattgttattggtaatcttttctgtgaatattaggtttcctccagaaatagtccgttatttgggaaagttaactgtgtgcacttttagatattaactacatttacaggcaaatcactgtaatgagaatggtactggaaaaatactgaatagacttgctaaatggcacatgcactacaagaggaaccttttgggttatttaatatgtacagaaaacattagaaaaaatttattacagaattctaattccagtatgaatagtggaaacccatctgtaaattagatggatgttggatggaaaatgacattgctaaatttgagaatttctttttacctactaatgtagattgctttgtataataaaacacagggtttggaaggttttgttacagggagcatggtctgttgaagatttttaaaatgtatttttctagattaacttctgtacatgaaatgtctaataaaactctaagaggtttagagatttttccattgg

SEQ ID NO: 426 - DNA, 1488 bp, Homo sapiens
gccacgtcactggctcaggctcagctgctgggtcaccaggagaatggacccttcctccacctcagctcagagcacagtgatgattcgtgactttcccaatagaacttcaaatctctgaggacggggggtggggggatgtgcttgagtgtttgtactcatggtcttgttctcggagtgacaaagctggaacacaatacctctatgcatgaaaaggttgtcacttgtcacaactaacaggctttcacctcaaggaaattttcttcccttgtgtacttttcccctggcagtggacatggctgcactcttccaagaagcaagcagctgtcccgtctgctcagactatctggaaaaaccaatgtccctggagtgtggatgcaccgtctgcctcaagtgcatcaattcgctgcagaaggagccccatggggaggatctgctttgctgttgctgttccatggtctctcagaggaacaaaatcaggcccaatcggcagctagagaggctggtttcccacatcaaggaactggagcccaagctgaagaagattctacagatgaacccaaggatgcggaagttccaagtggatatgaccttggatgccgacacagccaacaacttcctcctcatttctgacgacctcaggagcgtccgaagtgggctcatcacacagaatcggcaagaccttgccgagagatttgacgtgtccgtttgcatcctgggctcccctcgctttacctgtggccgccactactgggaggtggacgtgggaacaagcacagaatgggacctgggagtctgcagagaatctgttcactgcaaagggaagatccagctgaccacagagcttggattctggactgtgagtttgagggatggaagccgcctctctgccagcacggtgccgctgactttcctcttagtagaccgcaagttacagcgagtggggatttttctggatatgggcatgcagaacgtttccttttttgatgctgaaagtggttcccatgtctatacattcaggagcgtctctgctgaggagccactgcgcccatttttggctccttcaattccacctaatggtgatcaaggtgtcttgagcatctgtcctttgatgaactcaggcactactgatgctccagtccgtcctggggaggccaaataagccgccactgcaaaaaaaaacagggtcagaaaattacttgggtgggtagacttaggaattttctacttggtaaaagcattatacagtcataggagaaagatatgggacatttctataatctatattctaatttgattcgattattgagtcgtaagtattaattattgccaccatccaactcattgagtcttatggttcacatcttgtttcctatagaaatgttctgtattctcggatcaatttccaaatgctttactttttcatttctgtaagttcaaatcaatgtttaaattatagaagttatgaggtaaataaacatttggatatca

SEQ ID NO: 427 - DNA, 5200 bp, Homo sapiens
gaagtcgacggcgccggcggctcctgcaggaggccactgtctgcagctcccgtgaagatgtccactccagacccacccctgggcggaactcctcggccaggtccttccccgggccctggcccttcccctggagccatgctgggccctagcccgggtccctcgccgggctccgcccacagcatgatggggcccagcccagggccgccctcagcaggacaccccatccccacccaggggcctggagggtaccctcaggacaacatgcaccagatgcacaagcccatggagtccatgcatgagaagggcatgtcggacgacccgcgctacaaccagatgaaaggaatggggatgcggtcagggggccatgctgggatggggcccccgcccagccccatggaccagcactcccaaggttacccctcgcccctgggtggctctgagcatgcctctagtccagttccagccagtggcccgtcttcggggccccagatgtcttccgggccaggaggtgccccgctggatggtgctgacccccaggccttggggcagcagaaccggggcccaaccccatttaaccagaaccagctgcaccagctcagagctcagatcatggcctacaagatgctggccagggggcagcccctccccgaccacctgcagatggcggtgcagggcaagcggccgatgcccgggatgcagcagcagatgccaacgctacctccaccctcggtgtccgcaacaggacccggccctggccctggccctggccccggcccgggtcccggcccggcacctccaaattacagcaggcctcatggtatgggagggcccaacatgcctcccccaggaccctcgggcgtgccccccgggatgccaggccagcctcctggagggcctcccaagccctggcctgaaggacccatggcgaatgctgctgcccccacgagcacccctcagaagctgattcccccgcagccaacgggccgcccttcccccgcgccccctgccgtcccacccgccgcctcgcccgtgatgccaccgcagacccagtcccccgggcagccggcccagcccgcgcccatggtgccactgcaccagaagcagagccgcatcacccccatccagaagccgcggggcctcgaccctgtggagatcctgcaggagcgcgagtacaggctgcaggctcgcatcgcacaccgaattcaggaacttgaaaaccttcccgggtccctggccggggatttgcgaaccaaagcgaccattgagctcaaggccctcaggctgctgaacttccagaggcagctgcgccaggaggtggtggtgtgcatgcggagggacacagcgctggagacagccctcaatgctaaggcctacaagcgcagcaagcgccagtccctgcgcgaggcccgcatcactgagaagctggagaagcagcagaagatcgagcaggagcgcaagcgccggcagaagcaccaggaatacctcaatagcattctccagcatgccaaggatttcaaggaatatcacagatccgtcacaggcaaaatccagaagctgaccaaggcagtggccacgtaccatgccaacacggagcgggagcagaagaaagagaacgagcggatcgagaaggagcgcatgcggaggctcatggctgaagatgaggaggggtaccgcaagctcatcgaccagaagaaggacaagcgcctggcctacctcttgcagcagacagacgagtacgtggctaacctcacggagctggtgccgcagcacaaggctgcccaggtcgccaaggagaaaaagaagaaaaagaaaaagaagaaggcagaaaatgcagaaggacagacgcctgccattgggccggatggcgagcctctagacgagaccagccagatgagcgacctcccggtgaaggtgatccacgtggagagtgggaagatcctcacaggcacagatgcccccaaagccgggcagctggaggcctggctcgagatgaacccggggtatgaagtagctccgaggtctgatagtgaagaaagtggctcagaagaagaggaagaggaggaggaggaagagcagccgcaggcagcacagcctcccaccctgcccgtggaggagaagaagaagattccagatccagacagcgatgacgtctctgaggtggacgcgcggcacatcattgagaatgccaagcaagatgtcgatgatgaatatggcgtgtcccaggcccttgcacgtggcctgcagtcctactatgccgtggcccatgctgtcactgagagagtggacaagcagtcagcgcttatggtcaatggtgtcctcaaacagtaccagatcaaaggtttggagtggctggtgtccctgtacaacaacaacctgaacggcatcctggccgacgagatgggcctggggaagaccatccagaccatcgcgctcatcacgtacctcatggagcacaaacgcatcaatgggcccttcctcatcatcgtgcctctctcaacgctgtccaactgggcgtacgagtttgacaagtgggccccctccgtggtgaaggtgtcttacaagggatccccagcagcaagacgggcctttgtcccccagctccggagtgggaagttcaacgtcttgctgacgacgtacgagtacatcatcaaagacaagcacatcctcgccaagatccgttggaagtacatgattgtggacgaaggtcaccgcatgaagaaccaccactgcaagctgacgcaggtgctcaacacgcactatgtggcaccccgccgcctgctgctgacgggcacaccgctgcagaacaagcttcccgagctctgggcgctgctcaacttcctgctgcccaccatcttcaagagctgcagcaccttcgagcagtggtttaacgcaccctttgccatgaccggggaaaaggtggacctgaatgaggaggaaaccattctcatcatccggcgtctccacaaagtgctgcggcccttcttgctccgacgactcaagaaggaagtcgaggcccagttgcccgaaaaggtggagtacgtcatcaagtgcgacatgtctgcgctgcagcgagtgctctaccgccacatgcaggccaagggcgtgctgctgactgatggctccgagaaggacaagaagggcaaaggcggcaccaagaccctgatgaacaccatcatgcagctgcggaagatctgcaaccacccctacatgttccagcacatcgaggagtccttttccgagcacttggggttcactggcggcattgtccaagggctggacctgtaccgagcctcgggtaaatttgagcttcttgatagaattcttcccaaactccgagcaaccaaccacaaagtgctgctgttctgccaaatgacctccctcatgaccatcatggaagattactttgcgtatcgcggctttaaatacctcaggcttgatggaaccacgaaggcggaggaccggggcatgctgctgaaaaccttcaacgagcccggctctgagtacttcatcttcctgctcagcacccgggctggggggctcggcctgaacctccagtcggcagacactgtgatcatttttgacagcgactggaatcctcaccaggacctgcaagcgcaggaccgagcccaccgcatcgggcagcagaacgaggtgcgtgtgctccgcctctgcaccgtcaacagcgtggaggagaagatcctagctgcagccaagtacaagctcaacgtggaccagaaggtgatccaggccggcatgttcgaccagaagtcctccagccatgagcggcgcgccttcctgcaggccatcctggagcacgaggagcaggatgagagcagacactgcagcacgggcagcggcagtgccagcttcgcccacactgcccctccgccagcgggcgtcaaccccgacttggaggagccacctctaaaggaggaagacgaggtgcccgacgacgagaccgtcaaccagatgatcgcccggcacgaggaggagtttgatctgttcatgcgcatggacctggaccgcaggcgcgaggaggcccgcaaccccaagcggaagccgcgcctcatggaggaggacgagctcccctcgtggatcatcaaggacgacgcggaggtggagcggctgacctgtgaggaggaggaggagaagatgttcggccgtggctcccgccaccgcaaggaggtggactacagcgactcactgacggagaagcagtggctcaaggccatcgaggagggcacgctggaggagatcgaagaggaggtccggcagaagaaatcatcacggaagcgcaagcgagacagcgacgccggctcctccaccccgaccaccagcacccgcagccgcgacaaggacgacgagagcaagaagcagaagaagcgcgggcggccgcctgccgagaaactctcccctaacccacccaacctcaccaagaagatgaagaagattgtggatgccgtgatcaagtacaaggacagcagcagtggacgtcagctcagcgaggtcttcatccagctgccctcgcgaaaggagctgcccgagtactacgagctcatccgcaagcccgtggacttcaagaagataaaggagcgcattcgcaaccacaagtaccgcagcctcaacgacctagagaaggacgtcatgctcctgtgccagaacgcacagaccttcaacctggagggctccctgatctatgaagactccatcgtcttgcagtcggtcttcaccagcgtgcggcagaaaatcgagaaggaggatgacagtgaaggcgaggagagtgaggaggaggaagagggcgaggaggaaggctccgaatccgaatctcggtccgtcaaagtgaagatcaagcttggccggaaggagaaggcacaggaccggctgaagggcggccggcggcggccgagccgagggtcccgagccaagccggtcgtgagtgacgatgacagtgaggaggaacaagaggaggaccgctcaggaagtggcagcgaagaagactgagccccgacattccagtctcgaccccgagcccctcgttccagagctgagatggcataggccttagcagtaacgggtagcagcagatgtagtttcagacttggagtaaaactgtataaacaaaagaatcttccatatttatacagcagagaagctgtaggactgtttgtgactggccctgtcctggcatcagtagcatctg

SEQ ID NO: 428 - DNA, 1851 bp, Homo sapiens
ggcacgaggcggagcagagacaggccctcggggtggaggtctttggtttcataagagcctgagagagatttttctaagatatgtgtaacacaccaacgtactgtgacctaggaaaggctgctaaggatgtcttcaacaaaggatatggctttggcatggtcaagatagacctgaaaaccaagtcttgtagtggagtgatggaattttctacttctggtcatgcttacactgatacagggaaagcatcaggcaacctagaaaccaaatataaggtctgtaactatggacttaccttcacccagaaatggaacacagacaatactctagggacagaaatctcttgggagaataagttggctgaagggttgaaactgactcttgataccatatttgtaccgaacacaggaaagaagagtgggaaattgaaggcctcctataaacgggattgttttagtgttggcagtaatgttgatatagatttttctggaccaaccatctatggctgggctgtgttggccttcgaagggtggcttgctggctatcagatgagttttgacacagccaaatccaaactgtcacagaataatttcgccctgggttacaaggctgcggacttccagctgcacacacatgtgaacgatggcactgaatttggaggttctatctaccagaaggtgaatgagaagattgaaacatccataaaccttgcttggacagctgggagtaacaacacccgttttggcattgctgctaagtacatgctggattgtagaacttctctctctgctaaagtaaataatgccagcctgattggactgggttatactcagacccttcgaccaggagtcaaattgactttatcagctttaatcgatgggaagaacttcagtgcaggaggtcacaaggttggcttgggatttgaactggaagcttaatgtggtttgaggaaagcatcagatttgtccctggaagtgaagagaaatgaacccactatgttttggccttaaaattcttctgtgaaatttcaaaagtgtgaactttttattcttccaaagaattgtaatcctccccacactgaagtctaggggttgcgaatccctcctgagggagatgcttgaaggcatgcctggaagttgtcatgtttgtgccacgtttcagttcagttctgaagtgttattaaatgtgttcctcagcgacagtgtagcgtcatgttagaggagacgatctgacccaccagtttgtacatcacgtcctgcatgtcccacaccattttttcatgaccttgtaatatactggtctctgtgctatagtggaatctttggttttgcatcatagtaaaataaaataaacccatcacatttggaacataaaaaaaaaaaaaaaaaaaactcgaactagtctctctctctcaatggcgtcagttggtgagtgtccggccccagtaccagtgaaggacaagaaacttctggaggtcaaactgggggagctgccaagctggatcttgatgcgggacttcagtcctagtggcattttcggagcgtttcaaagaggttactaccggtactacaacaagtacatcaatgtgaagaaggggagcatctcggggattaccatggtgctggcatgctacgtgctctttagctactccttttcctacaagcatctcaagcacgagcggctccgcaaataccactgaagaggacacactctgcacccccccaccccacgaccttggcccgagcccctccgtgaggaacacaatctcaatcgttgctgaatcctttcatatcctaataggaattaacctccaaataaaacatgactggtacgtgaaaaaaaaaaaaaaaaaaa

SEQ ID NO: 429 - DNA, 2277 bp, Homo sapiens
acatggcgaacgaggttatcaagtgcaaggctgcagttgcttgggaggctggaaagcctctctccatagaggagatagaggtggcacccccaaaggctcatgaagttcgaatcaagatcattgccactgcggtttgccacaccgatgcctataccctgagtggagctgatcctgagggttgttttccagtgatcttgggacatgaaggtgctggaattgtggaaagtgttggtgagggagttactaagctgaaggcgggtgacactgtcatcccactttacatcccacagtgtggagaatgcaaattttgtctaaatcctaaaactaacctttgccagaagataagagtcactcaagggaaaggattaatgccagatggtaccagcagatttacttgcaaaggaaagacaattttgcattacatgggaaccagcacattttctgaatacacagttgtggctgatatctctgttgctaaaatagatcctttagcacctttggataaagtctgccttctaggttgtggcatttcaaccggttatggtgctgctgtgaacactgccaagttggagcctggctctgtttgtgccgtctttggtctgggaggagtcggattggcagttatcatgggctgtaaagtggctggtgcttcccggatcattggtgtggacatcaataaagataaatttgcaagggccaaagagtttggagccactgaatgtattaaccctcaggattttagtaaacccatccaggaagtgctcattgagatgaccgatggaggagtggactattcctttgaatgtattggtaatgtgaaggtcatgagagcagcacttgaggcatgtcacaagggctggggcgtcagcgtcgtggttggagtagctgcttcaggtgaagaaattgccactcgtccattccagctggtaacaggtcgcacatggaaaggcactgcctttggaggatggaagagtgtagaaagtgtcccaaagttggtgtctgaatatatgtccaaaaagataaaagttgatgaatttgtgactcacaatctgtcttttgatgaaatcaacaaagcctttgaactgatgcattctggaaagagcattcgaactgttgtaaagatttaattcaaaagagaaaaataatgtccatcctgtcgtgatgtgataggagcagcttaacaggcagggagaagcgcctccaacctcacagcctcgtagagcttcacagctactccagaaaatagggttatgtgtgtcattcatgaatctctataatcaaggacaaggataattcagtcatgaacctgttttctggatgctcctccacataaataattgctagtttattaaggaatattttaacataataaaagtaatttctacatttgtgtggaaattgtcttgttttatgctgtcatcattgtcacggttgtctgccattatcttcattctgcaagggaaagggaaaggaagcagggcagtggtgggtgtctgaaacctcagaaacataacgttgaacttttaagggtctcagtccccgttgattaaagaacagatcctagccatcagtgacaaagttaatcaggacccaagtctgcttctgtgatattatcttgaagggaggtactgtgccttgttcatacctgtaccccaaattcctaggatgcatctgccttcagggggcactaaaatgtattattgaaacagcattctgggcttaaataggtgtatgtatgtgttggttgtgactgtactattctagtatagtgaactacatactgaatatccaagttctcagcacctacttttgtcaaatcttaacattttgccacttcgagatcacattgccttcctcccctccaagaggtaacaattatccacaatttgatgtttatcattcctgtgttgttgtactttcactgtgtataacctaaaccatctactctttagtactgttttatatatttttaagcctcatacttgctcattctacagcttttttcactcattattgtataattatatctgaagctctcgttcattaattttagtcctgtgtagcagaattcaattacgggaaactaccataatttatctgttctccagtccagttgaaggcatgaagttgttgccagtttctgtattataacactgtagtggaacattcttctgcattgggctactcgcgtgttacctaagacgtatcacagaataaacacatttagccttatagacattgccaaattgctcttcaaagtaaatgtgagtttttgtg

SEQ ID NO: 430 - DNA, 4190 bp, Homo sapiens
caacctccagccagtccctgggtcgggcggatcctcccagaggtggcacaatggagcgatctccaggagagggccccagccccagccccatggaccagccctctgctccctccgaccccactgaccagccccccgctgctcacgcaaagccagacccaggttctgggggccaacctgctggccctggcgcggcgggtgaggccctggcggtgctgacttcattcgggaggcggttgctggtgctgatacctgtgtatttggccggggcagtgggactcagcgtgggtttcgtgctcttcggcctcgccctctacctgggctggcgccgggtccgcgacgagaaagaacggagccttcgagcagcgaggcagctactggacgacgaggagcagctcactgcgaaaactctctatatgagtcatcgagagctacctgcctgggtcagcttcccagacgtggaaaaggctgaatggctcaataagattgtggcccaggtctggcccttcctgggccagtatatggagaagcttctggctgaaactgtggctccggctgttaggggatctaacccccatctgcaaacatttacatttacacgagtggaactgggtgaaaagccattgcgcatcattggagtcaaggttcacccaggtcagagaaaagagcagatcctgctggacttgaacatcagctatgtaggtgatgtgcagattgatgtggaagtgaagaaatatttttgcaaagcaggagtcaagggcatgcagctacatggcgttttgcgggtgatactggagccactcattggggaccttcccttcgtgggggctgtgtcaatgttcttcatccgacgcccgaccctagacatcaactggacagggatgaccaacctgctggatatcccaggacttagctcactctctgacaccatgatcatggactccattgctgccttcctcgtgttgcccaaccgattactggtgccccttgtgcctgaccttcaagatgtggctcagttgcgttcccctctgcccaggggcattattcgaattcacctgctggctgctcgagggctgagttccaaggacaaatatgtgaagggcctgattgagggcaagtcagacccatatgcacttgtgcgtttgggtacccagacattctgcagtcgtgtcattgatgaagaactcaacccacagtggggagagacttatgaggtgatggtacacgaggtcccagggcaggagattgaagtggaggtgttcgacaaggatccagataaagatgactttctgggcagaatgaagctggatgtagggaaggtgttacaggctagcgttctggatgattggttccctctacaaggtgggcaaggccaagttcacttgaggctagaatggctgtcacttttgtcagatgcagagaaactggagcaggttctacagtggaattggggagtctcctctcgaccagatcccccgtcagctgccatcttagttgtctacctggatcgggcccaggatcttcctctgaagaaggggaacaaggaacccaaccctatggtacaactgtcaattcaggatgtgactcaggagagcaaggctgtctacagtaccaactgcccagtgtgggaggaagcgttccggttcttcctacaagaccctcaaagccaggagctcgatgtgcaagtgaaggatgattccagggccctgactttaggagcactgacgctgcctctggcccgcctgctgactgccccagaactcatcctggaccagtggttccagctcagcagctctggtccaaactccagactctatatgaaactagtcatgaggatcctgtacttggattcatcagaaatatgcttccccacggtgcctggttgtcctggtgcttgggacgtggacagtgagaatccccagagaggcagcagtgtggatgccccacctcgaccctgtcacacgactcctgatagccagtttgggactgagcatgtgcttcggatccatgtattagaggcccaggacctgattgccaaagaccgtttcttggggggactggtgaagggcaagtcagacccctatgtcaaactaaagttggcaggacgaagcttccggagccatgttgttcgggaagatctcaatccccgctggaatgaggtttttgaggtgatcgtcacatcagttccaggccaagagctagaggttgaagtctttgacaaggacttggacaaggatgattttctgggcaggtgtaaagtgcgtctcaccacagtcttaaacagtggcttccttgatgagtggctgaccctggaggatgtcccatctggccgcctgcacttgcgcctggagcgtctcaccccccgtcccactgctgctgagttagaggaggtgctgcaggtgaatagtttgatccagactcagaagagtgcggagctggctgcggccctgctatccatctatatggagcgggcagaggacctcccgctgcgaaaaggcaccaagcacctcagcccttatgctactctcactgtgggagatagttctcataaaaccaagactatttcgcaaacttcagcccctgtctgggatgagagtgcctcctttctcatcaggaaaccacacactgagagcctagagttgcaggttcggggtgagggcactggcgtgctgggctcattatccctgcccctctcagagctcctcgtggctgaccagctctgcttggaccgctggtttacactcagcagtggtcaggggcaggtgctactgagagcacagctagggatcctggtgtcccagcactcgggagtggaagctcatagccacagctacagccacagctcctcatcgctgagtgaagaaccagagctctcggggggaccccctcacatcacctcctcagccccagagctccggcagcgcctaacacatgttgacagtccccttgaggctccagccgggcctctgggccaggtgaaactgactctgtggtactacagtgaagaacgaaagctggtcagcattgttcatggttgccggtcccttcgacagaatggacgtgatcctcctgatccctatgtgtcactgttgctactgccagacaagaaccgaggcaccaagaggaggacctcacagaagaagaggaccctgagtcctgaatttaatgaacggtttgagtgggaactccccctggatgaggcccagagacgaaagctggatgtctctgtcaagtctaattcctccttcatgtcaagagagcgtgagctgctggggaaggtgcagctggacctagctgagacagacctttcccagggtgtagcccggtggtatgacctgatggacaacaaggacaagggcagctcctaggagctggcgagtcccagcctgactgctctgtcttcctgccttcgtctcgctccatcaccgcctcaatgtgatgagcctaaagctagggtccaagggcagagcctgtgcccttcagccctttcacctaacaggcccatattcgggcctttgcctgaccaaagagaagaaccgtatgttccctttactgcacggcctttatccttctgggcccctggggcggggacctgagctggctgtttcctgctttgcctgcacattgttctcccttcctcccaactcctcagggccttctgtatctgtgcctggccagtggcagcactagcagtggtattagcttatgccaaatacagctttggaaggatctttttttctttaactagatggtcaccttcttccctaccacacatgggtgggaaggtggacaggctaacctctccagctgtgagcctcttagactactgcatgtagcaaatgttcagcagctcaggcccccatgtccagttctgtccccactgtcctcaaccctgtcctgaaaattctactgctttgatggctggggccagtctcttgtcactttggaaactgaggacgcgtggattctactcaagcctccaagtagtggcatatcagtcttggagctcctagctggtgatacggagagggctttggaggacttgggacagcagggccaatttttttgcccaagtgcctaggctgctaactcactgactagaacttaatctggtactttacagttttgcaccaactctgccaagccactggatcttacattaaacatcatactcaaaaaaaaaaaaaaaaaaa

SEQ ID NO: 431 - DNA, 985 bp, Homo sapiens
gcctttccgtcaattcctgtcctgggcgtacgtcaagatggcggcgtctgtattaaacaccgtgctgaggcggcttcctatgctatctctcttccgaggttctcacagagttcaggttcccctccagactctttgcaccaaagctccctctgaggaagattctttgtcctcagttcccatttctccttataaggatgagccctggaaatatctggaatcagaagaataccaggagcgatatggttctcgccccgtctgggctgactaccgccgcaaccacaagggtggtgtacccccacagcggactcggaagacatgtattcgtcggaataaagttgttgggaatccctgccccatctgtcgagatcacaagttgcatgttgactttaggaacgtgaagctcttggagcaatttgtctgcgcccacacgggtatcatcttctatgctccatacacaggagtctgtgtgaagcagcacaagcggttgacccaggccatccagaaagccagggatcatggtctcctcatttaccacatcccccaggttgaaccacgggaccttgacttcagtacctctcatggggctgtgagtgctactccgccagcccccaccctggtctcaagtgacccctggtacccatggtacaactggaaacagccaccggagagagaactgtctcgccttcgccggctttaccagggtcatctccaagaagagagtggccccccacctgagtcaatgcccaagatgccccctagaacaccagcggaagcctcctccactgggcagacaggccctcagagtgctctgtaggagctgtagactgggaagagaggccaggcgtggtggctcactcctgtaatcccagcactttgggaagccaaggtgggctgatcacttgatcccaggagtttgagaccagcctgggcaccatggtgaaacctcgtctttaccaaaaaaaaaaaaaaaaaaaaaaaaaaaaaa

SEQ ID NO: 432 - DNA, 965 bp, Homo sapiens
cagcttgtcctctatgacttacccagaaggcaacgcttctctttctggtcaaaatggctggtaagcaggccgtttcagcatcaggcaagtggctggatggtattcgaaaatggtattacaatgctgcaggattcaataaactggggttaatgcgagatgatacaatatacgaggatgaagatgtaaaagaagccataagaagacttcctgagaacctttataatgacaggatgtttcgcattaagagggcactggacctgaacttgaagcatcagatcttgcctaaagagcagtggaccaaatatgaagaggaaaatttctaccttgaaccgtatctgaaagaggttattcgggaaagaaaagaaagagaagaatgggcaaagaagtaatcatgtagttgaagtctgtggatgcagctgttatgaagatggttaaacttgaaacaaacaattttaagaattatttggtctgaagatgttttactttaaataaatgtctattgtaatggctggagtttttgaattccaaaccttatactgaataactactgaatccctttactgttaaatttttttccaaactttcaagatatatttagttgtgtttaactgctacttggagctcagaagccactttatcagttttcctcactggttggatagcctatcagtttatggaaggatataacttccgtaagttacatccttatggaagctactgaataaaagaagggggtatgcaccccctagtttgccaagattgagaaatagcctcttcactggtatgcaaacagatttgattttgcatcctatcatttaaaaagaaattatgtctgcaccccaacataggcatacttaagtaatatacatactcctgtgctaacatgtatactagaaaacaaaaagatgttagaaaaataaaagtataaagacaaatcaaaaaaaaaaaaaaaaaaaaaaaaaaaa

SEQ ID NO: 433 - DNA, 4053 bp, Homo sapiens
gaattcgcggccgcgtcgaccaagatcattcctgggagtgaagtaaaacgggaagaaccagaagctttgtatgcagctgtaaataagaaacctacctcggcagcctattcagttggagaagaatatattgcactttatccatattcaagtgtggaacctggagatttgactttcacagaaggtgaagaaatattggtgacccagaaagatggagagtggtggacaggaagtattggagatagaagtggaatttttccatcaaactatgtcaaaccaaaggatcaagagagttttgggagtgctagcaagtctggagcatcaaataaaaaacctgagattgctcaggtaacttcagcatatgttgcttctggttctgaacaacttagccttgcaccaggacagttaatattaattctaaagaaaaatacaagtgggtggtggcaaggagagttacaggccagaggaaaaaagcgacagaaaggatggtttcctgccagtcatgttaaacttttgggtccaagcagtgaaagagccacacctgcctttcatcctgtatgtcaggtgattgctatgtatgactatgcagcaaataatgaagatgagctcagtttctccaagggacaactcattaatgttatgaacaaagatgatcctgattggtggcaaggagagatcaacggggtgactggtctctttccttcaaactacgttaagatgacgacagactcagatccaagtcaacagtgacccaatgttgtcttccagttgtgaaagcaccccagagacccactatccaagtttcactctagcgtggaggcagggcaggcagccctgatcaaatatctcctacacaattcgtttacttcgtttgaatgttagagccacttgtgattatttttttgtgtttctaacttacagtttaaatttatttgtaaaaagttaaaggatagtgggtctttgtgtggctttccctgctgttcactctggcatctttagcatttttcttcttttttaatttgataattgtaggtcattagcatgcatattgagtttgcccttatgtggtgggagttcaaacacacaaagacccactatttgcacaaactattcttactggtttggaataggctgccatgcttttttaatgttattgcaacatgtgtattcatttacagaattcagataaaatttgcttatgttctgctattatgtttgatctaatcctaatcacagtgagctcttaattagctcaatatgtggtttgccctcaagtgtgcactgtttattactttgtaatatgccactatgagtactgacatttagatatgtttaaaggccaaaaactggaaacagccatgccctgttttctgtgtatttgggatgggaataacaacattttgggggagctttttaaatctcagagaaaaggaaagtggcctgctctggcaggtatgtgcagtgtttcatttgttccagtcccaaaaatgagcactgtcctatggtagttcgcttaggatctttatgtgctctgggctaatgaaggtactgcatcatgtgctgcagcgtgtgtattctttttcgatgacctataaagggattatttttgaggaatgaaaggctcccatcattgactgtgagatgggaaaaacctttcctagcttagagcatttatatcttaatccattttaaagtcagagttcattgttacctgttttaatcaggtgactacatgtcccagtatacaaaggggcactggttgacattcttcttaatgtatttagtaaatatcataagaaatcctttaagagtttaaatgtccccaaaacagacatgcgggctctagtcaagaatgaattagagtgaaggaaagctgtgtaacacctggcattcctctgtgttcatggagcttctttgaggctctaagattgattttaccatcagacttctctaatacctgttcttcaaccatattggctactttgacataagaatttacttcttttcctggaatggaaaacactttaaaaaataataacaaacattattataaactaatatatgtgagagtacttagttgatacaaaaaggagttttagtagacagtattatactatatttgaaaatcaaggagaattttatgcaacttaaaatgtttacaaactgcagtgcaatctactgtttgtgaatgtcaaagtatcaggaaaagtgtatatacaatcacagagtcatatttcctcacaaagttatttacaaagagtgaaatatgtttttgtacctctcagtttcagttagaggcatattttgtgcaatatttatgttaatgtgcctatacattatgaatgaattatttcagtcatacattgcctaaatcataactttatgatgcttgggaaagaatcaacagttaaaacttcataaagttctaatgtctgtgttccaaaatacatcacattattaggatgtagggagataagtatgtgtgctccctagggtggcaatttctagttactagaccacctctatttttagcatttggcatcctcatgatacttttataaatatgacattaataggaaagcaataatttcattttacagatagaataacagatttgcctgcattcactgaaagagtgcaaagactgggtccttgtgaattcaactgactctcccaaattgtattaattacctgttcttgccttttattttctgaacttgctgcttttgcattcttttgagttcaaagacagttactttaaatccatttttaaaccctcggggtagaaatcataccactgttaatcagccacattatttggtctaaggttttttctttataattctgaaactgagtttatctaatacattgatgaattatttcaaacgtatttttatagttcaaatcagttcacttttacactgataaatataaattactaggaatgaccttcagacagcgtttagcatctgtaaccaacctgaaaataatatgttcatcaggtacctatggattaaatcatatactggcgtatttaagctgaatgtcagtctggaaaataaatttactatattaactgaaataccactctttgtgtaggtattttgtcatgtatttaagaaaaagataaaaagaatggaaatcatatgacataataacttaagtctttcttaaaagtgcatgctgtcttttgcaatacctcattcagccaagtatttgttctcttcctcattcagtataagtcagctttcaatttgcttagaaggcaacattagaaggttagagttcatcagaaacatagaattttaaaatgtgagttcaactgaataaatttgaatttctgtaggaggtaaagaatcaaaatacctgtttaaagattgcaattgcaatgtataataatcacttttaaattatttgattaaaccttttaggttttccagaaatgaaaaaaatcagttctaaaaccaaagctgatttttagaaaatttgagaatgtaaatcagccctatccataatatagtttctctaaaactttatcttaaagagtcattttaaaataatataactattaaaaatgtaactgatatttaaatgttttgaaataaaacattttaaaatataaatactgtagtttaaaagaaagaaactgggggaaagaaaagtagagaaagaaataccaattccagtccaaagctttatttgccagttttcttagaatgacttttaccagtttatgaattcttgtaaacagaatctataatggaaatactgaaagacttttgcctaaagtggcattattgaatgctgctgtgatgctactgtaatgtaataaattattaaattgttgcaaagtgctgtttttgccttaaaattttattttgtgtgtcttgaaaattatagtattaaaggtattgagattgtgcaaatgctgggcacgcttggcatgagataatctgtttttatttttaccaaattgtaatataactatgcaagtgtgtttattaaaagaacaccaactataaaaaaaagtcgacgcggccgcgaattccagctgac

SEQ ID NO: 434 - DNA, 781 bp, Homo sapiens
ggcacgagggtgtcctgcgcgctacgccgtctgtttctagggcaacgccggcgtctcttagcaaccgcgcgcggcctaggtgggtccccccggcacccccagacctgccatggcgaccgcgagtcctagcgtctttctactcatggtcaacgggcaggtggagagcgcccagtttccagagtatgatgacctctactgcaagtactgctttgtgtacggccaggactgggcccccacagcgggtctggaggaggggatctcacagatcacatccaagagccaagatgtgcggcaagcactggtgtggaacttccccattgatgtcacctttaaaagcaccaacccctacggctggccacagatcgtgctcagcgtgtatggaccagatgtgttcgggaacgatgtggttcgaggctatggggccgtgcacgtgcccttctcacctggccggcacaaaaggaccatccccatgtttgtcccagaatctacgtctaaactgcagaagtttacaagtttgtgcctggtcgcctcctcagatctgcaagctgctccacccactgaggacaaatagaaacaggtcccctgggagtgctgagtcacggggctcccttcagccctgttccagcagcagaaggccgggcgattttaccctgtgccctgtgaaaaatctttgtgtctgagggagcagaggaaaaactcttgtcagatgggaaaaatgctcatgacataatgtgacattaaaaggtgggaaacaagaggatataaaaaaaaaaaaaaaaaa

SEQ ID NO: 435 - DNA, 5175 bp, Homo sapiens
  modified_base (4596)..(4596): a, c, g, or t
gctgctgctgcagtgggacaggtggcggcgaccggcggcgtccgaggagatttaatccagagactgacttcactatagaacccacagttgtatcaatggttggggaaagatagtggcaacaggcaaaggagaaacagctctgacatacaaagaaaatgagtatgctaaagccaagtgggcttaaggcccccaccaagatcctgaagcctggaagcacagctctgaagacacctacggctgttgtagctccagtagaaaaaaccatatccagtgaaaaagcatcaagcactccatcatctgagactcaggaggaatttgtggatgactttcgagttggggagcgagtttgggtgaatggaaataagcctggatttatccagtttcttggagaaacccagtttgcaccaggccagtgggctggaattgttttagatgaacccataggcaagaacgatggttcggtggcaggagttcggtatttccagtgtgaacctttaaagggcatatttacccgaccttcaaagttaacaaggaaggtgcaagcagaagatgaagctaatggcctgcagacaacgcccgcctcccgagctacttcaccgctgtgcacttctacggccagcatggtgtcttcctccccctccaccccttcaaacatccctcagaaaccatcacagccagcagcaaaggaaccttcagctacgcctccgatcagcaaccttacaaaaactgccagtgaatctatctccaacctttcagaggctggctcaatcaagaaaggagaaagagagctcaaaatcggagacagagtattggttggtggcactaaggctggtgtagtccggtttcttggggagaccgactttgccaagggggagtggtgtggcgtggagttagatgagccacttgggaagaatgatggcgctgttgctggaacaaggtattttcagtgtcaacccaaatatggcttgttcgctcctgtccacaaagttaccaagattggcttcccttccactacaccagccaaagccaaggccaacgcagtgaggcgagtgatggcgaccacgtccgccagcctgaagcgcagcccttctgcctcttccctcagctccatgagctcagtggcctcctctgtgagcagcaggcccagtcggacaggactattgactgaaacctcctcccgttacgccaggaagatctccggtaccactgccctccaggaggccctgaaggagaagcagcagcacattgagcagctgctggcggaacgggatctggagagggcggaggtggccaaggccacgagccacgtgggggagatagagcaggagctagctctggcccgggacggacatgaccagcatgtcctggaattggaagccaaaatggaccagctgcgaacaatggtggaagctgctgacagggagaaggtggagcttctcaaccagcttgaagaggagaaaaggaaggttgaggaccttcagttccgggttgaagaagaatcaattaccaaaggtgatcttgaggtggctacagtttcagaaaagtcacgtataatggaactggagaaagacctagcattgagagtacaggaagtagctgagctccgaagaaggctagagtccaataagcctgctggggatgtggacatgtcactttcccttttgcaagagataagctctttgcaagaaaagttagaagtcacccgtactgaccaccagagagaaataacttctctgaaggagcattttggagcccgggaagaaactcatcagaaggagataaaggctctgtataccgccacggaaaagctttccaaagagaacgagtcattgaaaagcaagctggagcatgccaacaaagagaactcagatgtgatagctctatggaagtccaaactggagactgccatcgcatcccaccagcaggcgatggaagaactgaaggtatctttcagcaaagggcttggaacagagacggcagaatttgctgaactaaaaacacaaatagagaaaatgagactagattaccaacacgaaatagaaaatttgcagaatcaacaagactctgaacgggctgcccatgctaaagagatggaagccttgagggctaaactgatgaaagttattaaagaaaaggaaaacagtctggaagccatcaggtcgaaactggacaaagcagaagaccagcatctcgtagaaatggaagacacgttaaacaaattacaggaagctgaaataaaggtaaaggagctagaggtactgcaagccaaatgcaatgaacaaaccaaggttattgataattttacatcacagctcaaggctactgaagaaaagctcttggatcttgatgcacttcggaaagccagttccgaaggtaaatcggaaatgaagaaacttagacagcagcttgaggcagctgagaaacagattaaacatttagagattgaaaagaatgctgaaagtagcaaggctagtagcattaccagagagctccaggggagagagctaaagcttactaaccttcaggaaaatttgagtgaagtcagtcaagtgaaagagactttggaaaaagaacttcagattttgaaagaaaagtttgctgaagcttcagaggaggcagtctctgttcagagaagtatgcaagaaactgtaaataagttacaccaaaaggaggaacagtttaacatgctgtcttctgacttggagaagctgagagaaaacttagcagatatggaggcaaaatttagagagaaagatgagagagaagagcagctgataaaggcaaaggaaaaactggaaaatgacattgcagaaataatgaagatgtcaggagataactcttctcagctgacaaaaatgaacgatgaattacgtctgaaagaaagagatgtagaagaattacagctaaaacttacaaaggctaatgaaaatgcaagttttctgcaaaaaagtattgaggacatgactgtcaaagctgaacagagccagcaagaagcagctaaaaagcatgaggaagaaaagaaagaattggagaggaaattgtcggacctggaaaagaaaatggaaacaagccacaaccagtgtcaggagctgaaagccaggtatgagagagccacttctgagacaaaaaccaagcatgaagaaatcctacagaacctccagaagacgctgctggacacagaggacaagctgaagggcgcacgggaggagaacagtggcttgctgcaggagctggaggagctgagaaagcaagccgagaaagccaaagctgctcaaacagcggaagatgccatgcagataatggaacagatgaccaaagagaagactgagactctggcctccttggaggacaccaagcaaacaaatgcaaaactacagaatgaattggacacacttaaagaaaacaacttgaaaaatgtggaagagctgaacaaatcaaaagaactcctgactgtagagaatcaaaaaatggaagaatttaggaaagaaatagaaaccctaaagcaggcagcagctcagaagtcccagcagctttcagcgttgcaagaagagaacgttaaacttgctgaggagctggggagaagcagggacgaagtcacaagtcatcaaaagctggaagaagaaagatctgtgctcaataatcagttgttagaaatgaaaaaaagagaatccaagttcataaaagacgcagatgaagagaaagcttccttgcagaaatccatcagtataactagtgccttactcacagaaaaggatgccgagctggagaaactgagaaatgaggtcacagtgctcaggggagaaaacgcctctgccaagtccttgcattcagttgttcagactctagagtctgataaggtgaagctcgagctcaaggtaaagaacttggagcttcaactcaaagaaaacaagaggcagctcagcagctcctcaggtaatacagacactcaggcagacgaggatgaaagagcccaggagagtcagattgatttcctaaattcagtaatagtggaccttcaaaggaagaatcaagacctcaagatgaaggtggagatgatgtcagaagcagccctgaatgggaacggggatgacctaaacaattatgacagtgatgatcaggagaaacagtccaagaagaaacctcgcctcttctgtgacatttgtgactgctttgatctccacgacacagaggattgtcctacccaggcacagatgtcagaggaccctccccattccacacaccatggcagtcggggtgaggaacgcccatactgtgaaatctgtgagatgtttggacactgggccaccaactgcaatgacgacgaaaccttctgatgaagcctccagtggagaactgggcttgctcagacgcactcgcattgacacaacgtaacaccagcattgtgtgtgcagacttcaggagaactcatgttattttttaaccccgtcaacaaatctaggaaaatattttgatcttcaacaaattgccctttagtctccccgtatgagttagaataataaatatttagtaggtgagcttttcacctcgaattttgttttcttgatttttacgtttgaagacattgcaccagatgcnattacatttattggccccccgaccttgtagaaaaacccctaccctcacaataccttatttaagtaactttaaattatgccgttacttttcatatttgcactaagatatttccaggctgcatttgtatatttagattttttggttaagctttgacactggaatgagttgaaaaaatgtgccattttgcattttcatctactcatttaaagtattttattcttattcaaagaaatatctgagctctttgcactacctgttatcagtagtgcctttacttcaggcttgataatacttaggtgtgattataaaatcatgaagcaggtaaagggaggggcaagcccccaaactgctgtggggacattttataatctatatgctgcacccacttaatctactgtggtgttttgtttattagttttgcataatttcagcttctatatattgtatgtatatattttttaaaaatctatattttgggaaaaaaacatacacaatgtgtctttctttttggacatttacctttttgaaaaagaaaacacttaaaatgatcattaggacataacagactagggaattccg

SEQ ID NO: 436 - DNA, 653 bp, Homo sapiens
  modified_base (330)..(330): a, c, g, or t
aggaggagccgtgtgccctggcactgagcggccgcggggtgcgagatgagcactatgttcgcggacactctcctcatcgtttttatctctgtgtgcacggctctgctcgcagagggcataacctgggtcctggtttacaggacagacaagtacaagagactgaaggcagaagtggaaaaacagagtaaaaaattggaaaagaagaaggaaacaataacagagtcagctggtcgacaacagaaaaagaaaatagagagacaagaagagaaactgaagaataacaacagagatctatcaatggttcgaatgaaatccatgtttgctattggnttttgttttactgccctaatgggaatgttcaattccatatttgatggtagagtggtggcaaagcttccttttacccctctttcttacatccaaggactgcctcatcgaaatctgctgggagatgacaccacagactgttccttcattttcctgtatattctctgactatgtcgattcgacagaacattcagaagattctcggctttgccctttaacagccggcaccaagcagcaggtggattttttgggccaccacctccttctggaagtttttttgaacttaagacctattattttctattatcttttttagaccacacact

SEQ ID NO: 437 - DNA, 2540 bp, Homo sapiens
gaattccgcgccagggccgaccgttcttcctgtactacgcttcccaccacactcactaccctcagttcagtggacaaagcttcaccaagcgctcaggccgtgggccatttggggactccttgatggagctggatggagctgtaggggccttgatgacaactgtgggggacctcggtctgctggaagagacactagtcatcttcactgcagataacggtcctgagttgatgcgcatgtccaatggcggctgctctggcctcttgagatgtggaaaaggaacaacttttgaaggtggcgtccgagagcctgccttggtctactggccaggtcacattactcctggtgtaacccatgagctggccagctctctggacctgctgcccaccctggcagccctgaccggggtccgctgcccaacgtcaccttggatggtgttgacatcagccccttgctgctaggcacaggcaagagcccacggaagtctgtcttcttctacccgccctacccagacgagatccatggggtctttgctgttcggaatgggaaatacaaggctcatttcttcacccagggctccgcccacagtgacaccacttcagatcctgcctgtcatgctgccaaccgtctgacggctcatgagcccccactgctctacgacttatctcaggaccctggggagaactacaatgttttggaaaaccacagagggaagagatgggaaaatggctgtccaggagttttcggaattcgggttactgctgcagcttttggggtcgcccggccgccgctattacagtcttcccccgcatcagaaggttccattgccttctctttcccccacaatgcaggcaggcaccatagcccgttgggaaaaaaaagagggggacaaaatcaatgaaggtgacctaattgcagaggttgaaactgataaagccactgttggatttgagagcctggaggagtgttatatggcaaagatacttgttgctgaaggtaccagggatgttcccatcggagcgatcatctgtatcacagttggcaagcctgaggatattgaggcctttaaaaattatacactggattcctcagcagcacctaccccacaagcggccccagcaccaacccctgctgccactgcttcgccacctacaccttctgctcaggctcctggtagctcatatccccctcacatgcaggtacttcttcctgccctctctcccaccatgaccatgggcacagttcagagatgggaaaaaaaagtgggtgagaagctaagtgaaggagacttactggcagagatagaaactgacaaagccactataggttttgaagtacaggaagaaggttatctggcaaaaatcctggtccctgaaggcacaagagatgtccctctaggaaccccactctgtatcattgtagaaaaagaggcagatatatcagcatttgctgactataggccaaccgaagtaacagatttaaaaccacaagtgccaccacctaccccacccccggtggccgctgttcctccaactccccagcctttagctcctacaccttcgacaccctgcccagctactcctgctggaccaaagggaagggtgtttgttgaccctcttgcaaagaagttggcagtagagaaagggattgatcttacacaagtaaaagggacaggaccagatggtagaatcaccaagaaggatatcgactcttttgtgcctagtaaagttgctcctgctccggcagctgttgtgcctcccacaggtcctggaatggcaccagttcctacaggtgtcttcacagatatcccaatcagcaacattcgtcgggttattgcacagcgattaatgcaatcaaagcaaaccatacctcattattaccttctatcgtgtaaatatggagaagttttgttggtacggaaagaacttaataagatattagaagggagaagcaaaatttctgtcaatgacttcatcataaaagcttcagctttggcatgtttaaaagttcccgaagcaaattcttcttggatggacacagttataagacaaaatcatgttgttgatgtcagtgttgcggtcagtactcctgcaggactcatcacacctattgtgtttaatgcacatataaaaggagtggaaaccattgctaatgatgttgtttctttagcaaccaaagcaagagagggtaaactacagccacatgaattccagggtggcacttttacgatctccaatttaggaatgtttggaattaagaatttctctgctattattaacccacctcaagcatgtattttggcaattggtgcttcagaggataaactggtccctgcagataatgaaaaagggtttgatgtggctagcatgatgtctgttacactcagttgtgatcaccgggtggtggatggagcagttggagcccagtggcttgctgagtttagaaagtaccttgaaaaacctatcactatgttgttgtaactaactcaagaatttctaaactctcccaggtcacactgattcattcttaacaagcccgaattc

SEQ ID NO: 438 - DNA, 1107 bp, Homo sapiens
gggaaattaagtttcttgcggagtacggtggggattgcagctgctgagcagggattctggaaagcattgcgtacctgagcccccagcatggcgggcctaaagcggcgggcaagccaggtgtggctagaagagcatggtgagcaggaacatgggctgtacagcctgcaccgcatgtttgacatcgtgggcactcatctgacacacagagatgtgcgcgtgctttctttcctctttgttgatgtcattgatgaccacgagcgtggactcatccgaaatggacgtgacttcttattggcactggagcgccagggccgctgtgatgaaagtaactttcgccaggtgctgcagctgctgcgcatcatcactcgccacgacctgctgccctacgtcaccctcaagaggagacgggctgtgtgccctgatcttgtagacaagtatctggaggagacatcaattcgctatgtgacccccagagccctcagtgatccagaaccaaggcctccccagccctctaaaacagtgcctccccactatcctgtggtgtgttgccccacttcgggtcctcagatgtgtagcaagcggccagcccgagggagagccacacttgggagccagcgaaaacgccggaagtcagtgacaccagatcccaaggagaagcagacatgtggtgaggaaattcaagggttccagagatggagcagacttgaaggagaatataaagaactgctgggacactgggcagtttatgctattcagtacatcagactgcgggttcgggctgaatactgccagcatgagactgctctgcagggcaatgtcttctctaacaagcaggacccacttgagcgccagtttgagcgctttaaccaggccaacaccatcctcaagtcccggacctgggctccatcatctgtaacatcaagttctctgagctcacctacctcgatgcattctggcgtgactacatcaatggctctttattagaggcacttaaaggtgtcttcatcacagactccctcaagcaagctgtggggccatgaagccatcaagctgctgggtaaatgtaggacggagggagggactatggaggctggggccgacaggaaa

SEQ ID NO: 439 - DNA, 1381 bp, Homo sapiens
tgggtgttggaggctttaaggtagctttaaattcgtgttgtcctgggagctcgcccttttcggctggagtcgggctttacggcgccggatggctctggacgtgaagtctcgggcaaagcgttatgagaagctggacttccttggggagggacagtttgccaccgtttacaaggccagagataagaataccaaccaaattgtcgccattaagaaagagtctctgctggtagccactacagctgtgaatgtgctgtgtcatacctgaagccaatatgtctcggagtttcacctgaggcccatgatcaaacttggacatagatcagaagctaaagatggtataaatagaaccgccttaagagagataaaattattacaggagctaagtcatccaaatataattggtctccttgatgcttttggacataaatctaatattagccttgtctttgattttatggaaactgatctagaggttataataaaggataatagtcttgtgctgacaccatcacacatcaaagcctacatgttgatgactcttcaaggattagaatatttacatcaacattggatcctacatagggatctgaaaccaaacaacttgttgctagatgaaaatggagttctaaaactggcagattttggcctggccaaatcttttgggagccccaatagagcttatacacatcaggttgtaaccaggtggtatcgggcccccgagttactatttggagctaggatgtatggtgtaggtgtggacatgtgggctgttggctgtatattagcagagttacttctaagggttccttttttgccaggagattcagaccttgatcagctaacaagaatatttgaaactttgggcacaccaactgaggaacagtggccggacatgtgtagtcttccagattatgtgacatttaagagtttccctggaatacctttgcatcacatcttcagtgcagcaggagacgacttactagatctcatacaaggcttattcttatttaatccatgtgctcgaattacggccacacaggcactgaaaatgaagtatttcagtaatcggccagggccaacacctggatgtcagctgccaagaccaaactgtccagtggaaaccttaaaggagcaatcaaatccagctttggcaataaaaaggaaaagaacagaggccttagaacaaggaggattgcccaagaaactaattttttaaagagaacactggacaacattttactactgagggaaatagccaaaaaggcaaataatggaaaaatagtaaacattaagtaaatgctgtagaagtgagtttgtaaatattctacacatgtaaaatatgtaaaactatgggttatttttattaaatgtattttaaaaa

SEQ ID NO: 440 - DNA, 5099 bp, Homo sapiens
  modified_base (45)..(46): a, c, g, or t
  modified_base (73)..(73): a, c, g, or t
  modified_base (3089)..(3094): a, c, g, or t
  modified_base (3096)..(3096): a, c, g, or t
  modified_base (3099)..(3102): a, c, g, or t
  modified_base (3104)..(3106): a, c, g, or t
  modified_base (3109)..(3109): a, c, g, or t
  modified_base (3111)..(3111): a, c, g, or t
  modified_base (4273)..(4280): a, c, g, or t
  modified_base (4282)..(4282): a, c, g, or t
  modified_base (4332)..(4338): a, c, g, or t
  modified_base (4340)..(4340): a, c, g, or t
  modified_base (4342)..(4343): a, c, g, or t
  modified_base (4345)..(4346): a, c, g, or t
  modified_base (4348)..(4349): a, c, g, or t
  modified_base (5001)..(5001): a, c, g, or t
  modified_base (5082)..(5082): a, c, g, or t
aattcgcggccgcgtcgactacggctgcgagaagacgacagaagnngacctccatcagctcgccgcgcagcgnggctgtatttgcggcctgtgcgagtaggcgcttgggcactcagtctccctggcgagcgacgggcagaaatctcgaaccagtggagcgcactcgtaacctggatcccagaaggtcgcgaaggcagtaccgtttcctcagcggcggactgctgcagtaagaatgtcttttccacctcatttgaatcgccctcccatgggaatcccagcactcccaccagggatcccacccccgcagtttccaggatttcctccacctgtacctccagggaccccaatgattcctgtaccaatgagcattatggctcctgctccaactgtcttagtacccactgtgtctatggttggaaagcatttgggcgcaagaaaggatcatccaggcttaaaggctaaagaaaatgatgaaaattgtggtcctactaccactgtttttgttggcaacatttccgagaaagcttcagacatgcttataagacaactcttagctaaatgtggtttggttttgagctggaagagagtacaaggtgcttccggaaagcttcaagccttcggattctgtgagtacaaggagccagaatctaccctccgtgcactcagattattacatgacctgcaaattggagagaaaaagctactcgttaaagttgatgcaaagacaaaggcacagctggatgaatggaaagcaaagaagaaagcttctaatgggaatgcaaggccagaaactgtcactaatgacgatgaagaagccttggatgaagaaacaaagaggagagatcagatgattaaaggggctattgaagttttaattcgtgaatactccagtgagctaaatgccccctcacaggaatctgattctcaccccaggaagaagaagaaggaaaagaaggaggacattttccgcagatttccagtggccccactgatcccttatccactcatcactaaggaggatataaatgctatagaaatggaagaagacaaaagagacctgatatctcgagagatcagcaaattcagagacacacataagaaactggaagaagagaaaggcaaaaaggaaaaagaaagacaggaaattgagaaagaacggagagaaagagagagggagcgtgaaagggaacgagaaaggcgagaacgggaacgagaaagggaaagagaacgtgaacgagaaaaggagaaagaacgggagcgggaacgagaacgggatagggaccgtgaccggacaaaagagagagaccgagatcgggatcgagagagagatcgtgaccgggatagagaaaggagctcagatcgtaataaggatcgcagtcgatcaagagaaaaaagcagagatcgtgaaagggaacgagagcgggaaagagagagagagagagaacgagagcgagaacgagaacgggagcgagagagagagcgagagagggaacgggagcgagaaagagaaaaagacaaaaaacgggaccgagaagaagatgaagaagatgcatacgaacgaagaaaacttgaaagaaaactccgagagaaagaagctgcttatcaagagcgccttaagaattgggaaatcagagaacgaaagaaaacccgggaatatgagaaagaagctgaaagagaagaagaaagaagaagagaaatggccaaagaagctaaacgactaaaagaattcttagaagactatgatgatgatagagatgaccccaaatattacagaggaagtgctcttcagaaaaggttgcgtgatagagaaaaggaaatggaagcagatgaacgagataggaagagagagaaggaggagcttgaggaaatcaggcagcgccttctggcagaagggcatccagatccagatgcagagctccagaggatggaacaagaggctgagaggcgcaggcagccacaaataaagcaagagccagaatcagaagaggaggaagaagaaaagcaagaaaaagaagaaaaacgagaagaacccatggaagaggaagaggagccagagcaaaagccttgtctgaaacctactctgaggcccatcagctctgctccatctgtttcctctgccagtggcaatgcaacacctaacactcctggggatgagtctccctgtggtattattattcctcatgaaaactcaccagatcaacagcaacctgaggagcataggccaaaaataggactaagtcttaaactgggtgcttccaatagtcctggtcagcctaattctgtgaagagaaagaaactacctgtagatagtgtctttaacaaatttgaggatgaagacagtgatgacgtaccccgaaaaaggaaactggttcccttggattatggtgaagatgataaaaatgcaaccaaaggcactgtaaacactgaagaaaagcgtaaacacattaagagtctcattgagaaaatccctacagccaaacctgagctcttcgcttatcccctggattggtctattgtggattctatactgatggaacgtcgaattagaccatggattaataagaaaatcatagaatatataggtgaagaagaagctacattagttgattttgtttgttctaaggttatggctcatagttcaccccagagcattttagatgatgttgccatggtacttgatgaagaagcagaagtttttatagtcaaaatgtggagattattgatatatgaaacagaagccaagaaaattggtcttgtgaagtaaaactttttatatttagagttccatttcagatttcttctttgccacccttttaaggactttgaatttttctttgtctttgaagacattgtgagatctgtaattttttttttttgtagaaaatgtgaattttttggtcctctaatttgttgttgccctgtgtactcccttggttgtaaagtcatctgaatccttggttctctttatactcaccaggtacaaattactggtatgttttataagccgcagctactgtacacagcctatctgatataatcttgttctgctgatttgtttcttgtaaatattaaaacgactccccaattannnnnnanaannnnannnaanantgaaatgtactgtataggaaccaacatgaacaattttaattgaaaacaccagtcataaactattaccacccccactctcttttgatcagaaatggcaagcccttgtgaaggcatggagtttaaaattggaatgcaaaaattagcagacaatccattcctactgtatttctgtatgaatgtgtttgtgaatgtatgtgtaaaagtctttcttttccctaatttgctttggtggggtccttaaaacatttcccaactaaagaatagaattgtaaaggaaaagtggtactgttccaacctgaaatgtctgttataattaggttattagtttcccagagcatggtgttctcgtgtcgtgagcaatgtggtttgctaactggatggggttttcttattaataagatggctgcttcagcttctcttttaaaggaatgtggatcatagtgatttttccttttaattttattgctcagaaatgaggcatatcctaaaaatcctggagagctgtatttaatgcatttttgcactaattggtccttagtttaattctattgtatctgtttatttaacaaaaaattcatcataccaaaaagtgtaagtgaaaaccccctttaaaacaaaacaaaaaaatgaaataaaattaggcaaattgacagacagtgagagttttacaaacatgataggtattctgctcggcaatttgtaagtttacatgttatttaaggataaaggtaaatcattcaaggcagttaccaaccactaactatttgttttcatttttgtcttgtagaaggtttatatcttgttttaccttggctcattagtgtttaaaaatgtactgatgatgtgcttagagaaattcctggggctttcttcgttgtagatcagaatttcaccagggagtaaaattacctgaaaacgtaagaagttttaaacagcttttcacacaaattagatgcaactgttcccatgtctgagtacttatttaaaagaaaggtaaagattggcctgttagaaaaagcataatgtgagctttggattactggattttttttttttttaaacacacctggagaggacatttgaaaacactgttcttaccctcgaaccctgatgtggttccattatgtaaatatttcaaatattaaaaatgtatatatttgannnnnnnnantcatattctttcagaatcatgtaaataaatggcatcatgttgtaaaaaannnnnnnanannannanngttaaaaatatgggctgaactttttatggacttgatttttatgactattggtatctaaaggtcaaggaagccatttacattattttggatgaatctactatacatctatggaaatgtctcttttattttaaattctggtttctcaacggaaaatttcagaaaagatgccccttgccattttcgttaatttttcagtcttttcttagacacacccccagcctaagaccttgttcgaggagtttattgtgtctgtcttttcttaacatactgcactgttcttaagcatcatattgtgttgtttttatttagccactattaacatgaaggtttattcaggtagatttgatttcctttgcttcgtttcttctcctgctctgtcaactgtacttatcttaaagggccactctaaaaacaagggagatgtcgtaatctgaaacctttggggagatgtactctgtactgcataacatctccagtgaggtttgtgacaggacctcaactaaatatatgaatttgtgcaagttcatatattaaagtttctgcagcagagtgaaaattgttacagtaaatgtggtagaaactgttaatcgcttaatgccagtttaaatcatgttttgtaaccaagcttcagtaaaaggctttagattgtcanagttggttgatttttagaattgtatatataaagaattagacattaaacaggcatattctagtgtctgaaaatacacataanaaatttctattaaaaaa

SEQ ID NO: 441 - DNA, 1665 bp, Homo sapiens
  modified_base (16)..(26): a, c, g, or t
  modified_base (49)..(50): a, c, g, or t
  modified_base (648)..(648): a, c, g, or t
  modified_base (1488)..(1488): a, c, g, or t
  modified_base (1494)..(1496): a, c, g, or t
  modified_base (1498)..(1498): a, c, g, or t
  modified_base (1507)..(1508): a, c, g, or t
  modified_base (1515)..(1515): a, c, g, or t
  modified_base (1518)..(1518): a, c, g, or t
  modified_base (1525)..(1525): a, c, g, or t
  modified_base (1563)..(1563): a, c, g, or t
  modified_base (1577)..(1578): a, c, g, or t
  modified_base (1619)..(1619): a, c, g, or t
  modified_base (1638)..(1638): a, c, g, or t
ctagttctagatcgcnnnnnnnnnnnttttttttttttttttttttttnnggtttttaaaaggctttattggggaaacgtagaggggtggggaccgtccttggaggcctcaggacaccatcctccatgttgctgggcagttgaagtccccaggggcccctgctcagaagcgtgtcaccagtctctgcgggggcctcatctgtgactcctggaggggcccagcccggggtaaccactacccccccatccctcgttgctgttgctcctgctccaggttccgctgcaggacctgctgctggttggcaatgacacgccggatgccgttgacaaagttgccctggtcatgggggatgaggccaatgaagattttcttctctgaagagtacaggagcataagcacgcggatctcacacgatgctttgtaggaaaagtgcacgcagccggcgaagccattgtccatgatccggcacaggctcttcagtgtctccaggtccttggtgaagtggaactggaccaggcgcgagttccggaacagcggcactagggtggtcagcagctgctgcgggatgagctgcatgtacagcttccttggccactgctcggtcctcaggatctccccctggttcacgtagacgtgggatggcagccnacctcttggaccgactgttgggctcaggcctgggctcctgccactccatgacaccactccatgccagaaacttgttgttgacgatctggactgggcctgagttgacaccaccaggtcccactgcctgcttgcgggtggtgatgacctgccggatggcactgacgaagccgctctggtcgtaggggatgaggcccatgaagatcttcttcttggacgagtacaggagcatgagcacgcgcacctcacagggggagatgtgggggaacagcatgcagcccgcgaagccgttgcccatgatgcggcagagccccttgagcgagtcgcagtctctgttggtgaagtggaactgtgccaactgggagttccggaacagggggcccagggtggtcagcagctgctgagggatcagctgcatgatcagcttctgcggccactggtcggtctccaggttctcgccttggttcacgtaggcttggcagggcagggtccgcttcagctttgcagtggagtcagagtagggtctgcgcttctcctgccactcgaggacgccgctccaagccagcagcttgttgctgagccggtgctcgctcacggccagacccccgagggtgagcccaggtgaggagggaccgatgggacccagtgccccgaagacccgagcaccttccatgggaggggccgagcgggcccggatccgcggaggctgcgggcctcgggggctggcaggccaggagcgcgagcggacggcgcgcaccacgaggggccgcggagggcggccgcgacccccgagggggcccccggcgccggagcggtacggggcacggcgcggacggaccatgncgggcnnngnccgagcggnncgggganctnccgcggnccacaaggggggctgcgggctccaccgactgaggggcncgggcgcgggcgcnnggcttcgggggagacgggctgagccgtaccaagctcggggnacgcgccgccggagtgggntcgccgcggccgaaccactgaggcgag

SEQ ID NO: 442 - DNA, 6750 bp, Homo sapiens
  modified_base (28)..(28): a, c, g, or t
  modified_base (72)..(72): a, c, g, or t
  modified_base (117)..(117): a, c, g, or t
  modified_base (129)..(129): a, c, g, or t
  modified_base (137)..(137): a, c, g, or t
  modified_base (142)..(142): a, c, g, or t
  modified_base (216)..(226): a, c, g, or t
  modified_base (377)..(377): a, c, g, or t
  modified_base (656)..(656): a, c, g, or t
  modified_base (2264)..(2264): a, c, g, or t
  modified_base (2545)..(2545): a, c, g, or t
  modified_base (2802)..(2802): a, c, g, or t
  modified_base (2844)..(2844): a, c, g, or t
  modified_base (4723)..(4723): a, c, g, or t
  modified_base (4882)..(4882): a, c, g, or t
  modified_base (5620)..(5620): a, c, g, or t
  modified_base (5957)..(5957): a, c, g, or t
  modified_base (6611)..(6611): a, c, g, or t
  modified_base (6615)..(6615): a, c, g, or t
  modified_base (6625)..(6628): a, c, g, or t
acacgcgcttcaacttcggttggtgtgngtcgaagaaacctgactgcgccctgaggagaacagcggagaagngtccaccgagcctggcgaaaggtccgctgagcgggctgtcgtccnggagccactccngggctgcnggagnacccagtggagaccgcgcctggctcaggtgtgggaccccatccttcctgtcttcgcagaggagtcctcgcgtgnnnnnnnnnnnaaataagcgggttttgaaaacaaaaaaaagaaggagtggaagagggggccaggatccaggcctccatccccacagaagtgaagctacagctgggaggtctcctcccaccccaaccgtcaccctgggtcccgactgcccacctcctcctccnccccctccccccaacaacaacaacaacaacaactccaagcacaccggccataagagtgcgtgtgtccccaacatgaccgaacgaagaagggacgagctctctgaagagatcaacaacttaagagagaaggtcatgaagcagtcggaggagaacaacaacctgcagagccaggtgcagaagctcacagaggagaacaccacccttcgagagcaagtggaacccacccctgaggatgaggatgatgacatcgagctccgcggtgctgcagcagctgctgcncccaccccctccaatagaggaagagtgcccagaagacctcccagagaagttcgatggcaacccagacatgctggctcctttcatggcccagtgccagatcttcatggaaaagagcaccagggatttctcagttgatcgtgtccgtgtctgcttcgtgacaagcatgatgaccggccgtgctgcccgttgggcctcagcaaagctggagcgctcccactacctgatgcacaactacccagctttcatgatggaaatgaagcatgtctttgaagaccctcagaggcgagaggttgccaaacgcaagatcagacgcctgcgccaaggcatggggtctgtcatcgactactccaatgctttccagatgattgcccaggacctggattggaacgagcctgcgctgattgaccagtaccacgagggcctcagcgaccacattcaggaggagctctcccacctcgaggtcgccaagtcgctgtctgctctgattgggcagtgcattcacattgagagaaggctggccagggctgctgcagctcgcaagccacgctcgccaccccgggcgctggtgttgcctcacattgcaagccaccaccaggtagatccaaccgagccggtgggaggtgcccgcatgcgcctgacgcaggaagaaaaagaaagacgcagaaagctgaacctgtgcctctactgtggaacaggaggtcactacgctgacaattgtcctgccaaggcctcaaagtcttcgccggcgggaaactccccggccccgctgtagagggaccttcagcgaccgggccagaaataataaggtccccacaagatgatgcctcatctccacacttgcaagtgatgctccagattcatcttccgggcagacacaccctgttcgtccgagccatgatcgattctggtgcttctggcaacttcattgatcacgaatatgttgctcaaaatggaattcctctaagaatcaaggactggccaatacttgtggaagcaattgatgggcgccccatagcatcgggcccagttgtccacgaaactcacgacctgatagttgacctgggagatcaccgagaggtgctgtcatttgatgtgactcagtctccattcttccctgtcgtcctaggggttcgctggctgagcacacatgatcccaatatcacatggagcactcgatctatcgtctttgattctgaatactgccgctaccactgccggatgtattctccaataccaccatcgctcccaccaccagcaccacaaccgccactctattatccagtagatggatacagagtttaccaaccagtgaggtattactatgtccagaatgtgtacactccagtagatgagcacgtctacccagatcaccgcctggttgaccctcacatagaaatgatacctggagcacacagtattcccagtggacatgtgtattcactgtccgaacctgaaatggcagctcttcgagattttgtggcaagaaatgtaaaagatgggctaattactccaacgattgcacctaatggagcccaagttctccaggtgaagagggggtggaaactgcaagtttcttatgattgccgagctccaaacaattttactatncagaatcagtatcctcgcctatctattccaaatttagaagaccaagcacacctggcaacgtacactgaattcgtacctcaaatacctggataccaaacataccccacatatgccgcgtacccgacctacccagtaggattcgcctggtacccagtgggacgagacggacaaggaagatcactatatgtacctgtgatgatcacttggaatccacactggtaccgccagcctccggtaccacagtacccgccgccacagccgccgcctccaccaccaccacngccgccgcctccatcttacagtaccctgtaaatacctgtcatgtccttcaggatctctgccctcaaaatttattcctgttcagcttctcaatcagtgactgtgtgctaaattttaggctactgtatcttcaggccacctgaggcacatcctctctgaaacggctatggaaggttagggccactctggactggcacacatcctaaagcaccaaaagaccttcaacattttctgagagcaacagagtatttgccaatanatgatctctcatttttccaccttgactgccaatctaactaanataattaataagtttactttccagccagtcctggaagtctgggttttacctgccaaaacctccatcaccatctaaattataggctgccaaatttgctgtttaacatttacagagaagctgatacaaacgcaggaaatgctgatttctttatggagggggagacgaggaggaggaggacatgacttttcttgcggtttcggtaccctctttttaaatcactggaggactgaggccttattaaggaagccaaaattatcggtgcagtgtggaaaggcttccgtgatcctctcgctgcacccttagaaacttcaccgtcttcaaactccatttccatggttctgttaattctcaaggagcagcaactcgactggttctcccaggagcaggaaaaacccttgtgacatgaaacatctcaggcctgaaaagaaagtgctctctcagatggactcttgcatgttaagactatgtcttcacatcatggtgcaaatcacatgtacccaatgactccggctttgacacaacaccttaccatcatcatgccatgatggcttccacaaagcattaaacctggtaaccagagattactggtggctccagcgttgttagatgttcatgaaatgtgaccacctctcaatcacctttgagggctaaagagtagcacatcaaaaggactccaaaatcccatacccaactcttaagagatttgtcctggtacttcagaaagaattttcatgagtgttcttaattggctggaaaagcaccagctgacgttttggaagaatctatccatgtgtctgcctccatatgcatctgggcatttcatcttcagtcccctcattagactgtagcattaggatgtgtggagagaggagaaatgatttagcacccagattcacactcctatgcctggaagggggacatctttgaagaagaggaattagggctgtggacactgtcttgaggatgtggacttccttagtgagctccacattacttgatggtaaccacttcaaaaggatcagaatccacgtaatgaaaaaggtccctctagaggatggagctgatgtgaagctgccaatggatgaaaagcctcagaaagcaactcaaaggactcaaagcaacggacaacacaagagttgtcttcagcccagtgacacctctgatgtcccctggaagctttgtgctaacctgggactgcctgacttcctttagcctggtcccttgctactaccttgaactgttttatctaacctctctttttctgtttaattctttgctactgccattgaccctgctgcaggatttgtgtcattttcctgcctggttgctgagactccattttgctgccacacacagagatgtaagaggcaggctttaattgccaaagcacagtttgagcagtagaaaacaacatggtgtatatctcaaattgcctgacatgaagaggagtctaacggtgaagtttcacttttcatcagcatcatctttcacatgttcattatcatccgctcttattcttgcatgtttaaacacttaaaatttttagtataatttttagtgtgttttgaagtggtgactaggctttcaaaaacttccattgaattacaaagcactatccagttcttattgttaaactaagtaaaaatgataagtaacatagtgtaaaatattcctttactgtgaacttcttacaatgctgtgaatgagaggctcctcagaactggagcatttgtataataattcatcctgttcatcttcaattttaacatcatatataatttcaattctatcaattgggcctttaaaaatcatataaaaggatataaaatttgaaaagagaaacctaattggctatttaatccaaaacaacttttttttnccttcaatggaatcagaaagcttgtcaatcactcatgtgttttagagtaattacttttaaaatggtgcatttgtgcttctgaactattttgaagagtcacttctgtttacctcaagtatcaattcatcctccatacatttgaattcaagttgttttttngtcaaatttacagttgtcaattgatcttcaagctgcagggtgcctagaaatgggccgttgtctgtagccctggcatgtgcacacggacatttgccaccactgcaagcaaaagtctggagaagttcaccaacgacaagaacgattagggaaaatatgctgctgtgggttaacaactcagaaagtccctgatccacatttggctgtttactaaagcttgtgattaactttttggcagtgtgtactatgctctattgctatatatgctatctataaatgtagatgttaaggataagtaattctaaatttattattctatagttttgaagtttggttaagtttcctttcactcaattgatttattttgttgttaatcaaatttatgttaattggatcctttaaattttttttggcattttccaacaaaaatggctttattcataagaaaggaaaaaaatcaatggaatttgatatctaaagaagttagaaagggagcaaaataaaaaacataaaggagatagatgaattagtaagcaaatcagtagtcgagtttttcaaactggcaaaattaattaattgacttttagcccaaatttacattgttaattaaatcaagaaggaagaagatctaagagctcccattgataggcaagcctagagagaactagctaaatttatcatgctaggatattgaaacacagaaagtttacatacatttatgaagggtcaatttagtttggnacagtgaggtatttgtcttagtggaaaaaaggagaattagtctgatcaaatcgtgaagtaatacagtgaacttgcaggtgcacaaaataagagggccacatctatatggtgcagtctggaattctgtttaagtttgtaggtacctcttggacttctgaattgatccagttgtcatccaccacagacatctcacatcagatacagacagttccaagattgacaacagagaacaacctgctggaaagacctgggcagaaatggagagccctgcgggaaccatgctacattttcatctaaagagagaatgcacatctgatgagactgaaagttctttgtngttttagattgtagaatggtattgaattggtctgtggaaaattgcattgcttttatttctttgtgtaatcaagtttaagtaataggggatatataatcataagcattttagggtgggagggactattaagtaattttaagtgggtggggttatttagaatgttagaataatattatgtattagatatcgctataagtggacatgcgtacttacttgtaaccctttaccctataattgctatccttaaagatttcaaataaactcggagggaactgcagggagaccaacttatttagagcgaattggacatggataaaaaccccagtgggagaaagttcaaaggtgattagattaataatttaatagaggatgagtgacctctgataaattactgctagaatgaacttgtcaatgatggatggtaaattttcatggaagttataaaagtgataaataaaaacccttgcttttacccctgtcagtagccctcctcctaccactgaaccccattgcccctacccctccttctaactttattgctgtattctcttcactctatatttctctctatttgctaatattgcattgctgttacaataaaaattcaataaagatttagtggttaagtgcaaaaaaaaaaaaaaaaaaaaaaanaaanaaaaaaaaannnnagggggggcccggtacccaattcgccctatagtgagtcgtattacaattcactggcccgcgttttacaacgtcgggactgggaaaaccttggcgttacccaacttaatcgccttgcagaata

SEQ ID NO: 443 - DNA, 8288 bp, Homo sapiens
  modified_base (332)..(332): a, c, g, or t
  modified_base (347)..(348): a, c, g, or t
  modified_base (350)..(352): a, c, g, or t
  modified_base (563)..(564): a, c, g, or t
  modified_base (1111)..(1112): a, c, g, or t
  modified_base (1219)..(1219): a, c, g, or t
  modified_base (1226)..(1226): a, c, g, or t
  modified_base (1233)..(1233): a, c, g, or t
  modified_base (1235)..(1235): a, c, g, or t
  modified_base (1272)..(1273): a, c, g, or t
  modified_base (1863)..(1863): a, c, g, or t
  modified_base (1906)..(1906): a, c, g, or t
  modified_base (1910)..(1910): a, c, g, or t
  modified_base (2144)..(2144): a, c, g, or t
  modified_base (2146)..(2146): a, c, g, or t
  modified_base (2413)..(2413): a, c, g, or t
  modified_base (2486)..(2486): a, c, g, or t
  modified_base (2492)..(2492): a, c, g, or t
  modified_base (2494)..(2494): a, c, g, or t
  modified_base (2511)..(2511): a, c, g, or t
  modified_base (2516)..(2516): a, c, g, or t
  modified_base (2522)..(2522): a, c, g, or t
  modified_base (2539)..(2539): a, c, g, or t
  modified_base (2544)..(2544): a, c, g, or t
  modified_base (2555)..(2555): a, c, g, or t
  modified_base (2560)..(2560): a, c, g, or t
  modified_base (2572)..(2572): a, c, g, or t
  modified_base (2596)..(2596): a, c, g, or t
  modified_base (3848)..(3849): a, c, g, or t
  modified_base (3853)..(3853): a, c, g, or t
  modified_base (3857)..(3857): a, c, g, or t
  modified_base (3868)..(3869): a, c, g, or t
  modified_base (3877)..(3877): a, c, g, or t
  modified_base (3913)..(3913): a, c, g, or t
  modified_base (3920)..(3920): a, c, g, or t
  modified_base (4493)..(4493): a, c, g, or t
  modified_base (4508)..(4508): a, c, g, or t
  modified_base (4510)..(4510): a, c, g, or t
  modified_base (4512)..(4514): a, c, g, or t
  modified_base (5665)..(5665): a, c, g, or t
  modified_base (7579)..(7579): a, c, g, or t
  modified_base (7653)..(7653): a, c, g, or t
  modified_base (8106)..(8106): a, c, g, or t
  modified_base (8223)..(8223): a, c, g, or t
  modified_base (8225)..(8225): a, c, g, or t
ttacaatcgaagcaagcgacaaggagacatctggaacaaacgggtggaagtgcagtgccttgctcttgctggaggtgctgggtggctcccacaagcacgccgtggatggtgctgtgaaggaaactcacgaagctgtggaaagagaaccccgggctggtggaacagtacttgtcagccattctcagcctagagcccaaccagaactatgctggcatgctggggctgctggtgcagttctgcacgagtcacaaggagatggacgtggtcagtcagcacaagagcgccctactggacttttacatgaagaacatcctgatgagcaaagtcaagcntccgaagtacctgtnngnnngctgtgcccctctgctccgatacctgtcccactcagaatttaaggatctgatactgcccaccatacagaagtccttactgaggagtccagagaatgttattgaaactatttctagtctgctggcatcagtgacgcttgacctcagccagtatgccatggacatcgtgaaaggactggctggtcacctgaaatccaacagtccccgcctganngatgaagctgtgctggcactgcggaacctggcacgccagtgcagtgactcttcggccatggaatccctgaccaagcacctatttgctatcctcggaggctcggaaggaaaactaactgttgtagcccagaagatgagcgtcctctcagggattgggagcgtcagtcatcacgtggtgtctggaccttccagtcaggtcctgaatgggatcgtggctgagctgttcatcccgttccttcagcaggaagttcatgaagggaccttggtacacgctgtctcagtcctggctctctggtgtaaccgattcactatggaagtgcccaagaagctcactgaatggttcaaaaaagctttcagccttaaaacctccacatctgcggtgaggcatgcctacctgcagtgcatgttggcctcttaccggggtgacacgctgttgcaggccctggacttactgcccttgctcatccagacagtggagaaggcagcctcccaaagcactcaggttcccaccatcaccgaaggggttgccgcagccttgttgctcttanngttgtcagtggctgactcacaggctgaggccaaactgagcagtttctggcagttgattgtggatgagaaaaagcaggttttcacttctgagaaattcctggtcatgncttcagnaggatgncnctgtgtactgtgttgcatctgacagagagacttttcnntgaccacccgcatagactcactggcaacaaagttcagcagtaccaccgggctctggtggcggtgctcctgagccgcacctggcacgtccgcaggcaggctcagcagacagttcggaagctgctgtcctctcttgggggctttaagctggcgcacggactcttggaggagctgaagactgtcctcagttctcacaaggtgctgcccttagaggctttggtgactgatgctggagaggtgactgaggcaggcaaggcctacgtgcctccacgggtcctgcaggaggctctgtgtgtcatctccggtgtgccagggctcaagggtgatgtcaccgacactgaacaactggcccaggaaatgctgatcatctcccaccacccatccttagttgccgtgcagtctggactttggccagcacttcttgccaggatgaagatcgatcctgaagcctttatcaccaggcacctggatcagatcattcccaggatgaccacacagagtcccctaaaccagtcctccatgaatgccatgggctccctttccgtcctgtcgccggaccgggtcctcccacagctcatcagcaccatcactncctccgtgcagaaccctgcactgcgcctggtgacgcgggaggngttngccattatgcagacccctgctggggagctgtatgacaaatccatcattcagagtgcccagcaggacagcataaaaaaggccaacatgaagcgagagaacaaagcttattccttcaaagagcagatcatcgagctggagctgaaggaggagataaagaagaagaaaggcatcaaagaggaggtgcagctgaccagcaagcagaaggagatgctgcaggcccagctagacagggangngcaggtccggaggcggctgcaggagctggatggggagctggaggcggcgcttggactgctggacatcatcctggccaagaacccgtccggcctgacccagtacatccctgttttggtcgactcttttctgcccttgctgaagtctcccctggctgctcccaggatcaagaaccccttcttgtccttggctgcctgtgtcatgccctctaggctcaaggctttgggcactttggtgagccacgtgaccctgcgcctgctgaagccagnagtgtgtcctggataagtcctggtgccaggaagagctgtcggtggctgtgaagagggcggtgatgctgctgcncacccnanaccatcaccagcagggngggcnaggggnagccaggtgctgcgccnttgtnccgcgccagcnttctncttagtcttccngtttctgaagatggtgctgacggngatgccccaccacagtgaggaggaggaggagtggatggcccagattcttcagatcctcactgtccaagcccagctgagggcctcccccaacaccccacccgggcgggtggacgagaatggcccggagttgctgcctcgcgtggccatgctgcgtcttctgacttgggtgatcgggacgggctcgcctcgcttacaggttctggcttcagacaccctgaccaccctgtgtgccagcagcagtggtgatgatggctgtgcctttgcagagcaggaggaggtggacgtgctgctctgtgccttgcagtccccgtgtgccagcgtgcgggaaaccgtgctccgggggctgatggaactccacatggtattgccagcacctgatactgatgagaagaatggcctgaaccttctgcggagactctgggtggtcaagtttgacaaggaggaggagatccggaagctggctgagaggctctggtcaatgatgggcctagacctgcagccagacctctgctccttgctgattgacgacgtgatctatcatgaggcggctgtaaggcaggcaggggccgaagccctctcccaagcagtggcacgttaccagcggcaggcggcggaggttatgggcaggctcatggagatttaccaggaaaagctctaccggccgcccccagtgctggatgctttgggacgagttatttcagaatctcctccagatcagtgggaagccaggtgtggcttggcgttggccctcaacaagctctcccagtatttggacagctctcaggtgaagccactctttcagttttttgtccctgatgccctcaatgaccgacacccagatgtccggaagtgcatgttggatgcagccctcgcaacgctcaacactcatgggaaggagaacgtcaactcgctgttgccagtattcgaggagttcctgaagaacgcgcccaatgatgccagctatgatgctgtgcgacagagtgtggtggtcctgatgggctctctggccaagcacctggacaagagtgaccccaaagtgaagcccattgttgccaagctcatcgctgccctctccaccccctcccagcaggtccaggagtccgtagccagctgcttgccacccctcgtgccagccatcaaggaggatgctggagggatgatccagaggcttatgcagcagctgctggagtcagacaagtacgcagagcgcaaaggggccgcctatggcctggcgggcctggtgaagggcctnngcancctntcgctgaagcnncaggagangatggcggcactgactgatgccatccaagataagangaacttncgccggcgagagggagccctctttgccttcgagatgctctgcaccatgctggggaaactttttgagccgtatgtggttcacgtgctgccccatctgctcctgtgctttggggatggaaaccagtatgtgcgtgaggctgcagatgactgtgccaaggctgtgatgagcaacttgagtgctcacggggtgaagctggtgctcccctccttactggctgccctggaggaggaatcgtggcggaccaaagctgggtcagtggagcttcttggggcaatggcgtactgtgctcctaagcagctgtcatcctgtctacccaacattgtgcccaagcttacggaggtgctgaccgactcccatgtcaaagtccagaaggctggacagcaggcgctcaggcagatcggctccgttatcaggaacccggagatcctggccattgctccagtcctcctggatgccctgacggatccctccaggaagacccagaagtgcttgcagaccctgctggacaccaagtttgtccacttcattgatgccccatccctggccctcatcatgcccattgtccagagagcnttccaggaccgttcnangnnnacgcggaagatggcagcccagattattggcaacatgtactccctgacagaccagaaggacttggctccgtacctgcccagcgtgacgcctggcctgaaagcatcgcttttggaccctgtgcctgaggtgcggaccgtatctgcaaaggcccttggggccatggtgaagggcatgggggagtcgtgctttgaggacttgctgccgtggctgatggagacactgacctatgagcagagctctgtggatcgctcaggcgctgcacaggggttggctgaggtcatggccggtttgggggtggagaagttggagaagttgatgccagaaatcgtggctacagccagcaaagtggacattgcaccccatgtccgagatggctacattatgatgtttaactacctgcccatcacctttggagacaagtttactccttatgtggggcccatcatcccctgtatcctcaaagctcttgctgatgagaatgagtttgtgcgtgacaccgccctgcgcgcgggccagcgggttatctccatgtacgctgagacagccatcgccctgctgctgccccagctagagcaaggcctctttgatgacctttggagaatcaggttcagctctgttcagctccttggggatctcctgtttcacatctcaggagtcactgggaagatgaccacagaaactgcctctgaggatgataactttggaactgcccagtccaacaaggcgatcatcactgccctgggggtagagcggcggaaccgggtgttggcagggctgtacatgggccgctcagacacccagctggtggtgcggcaggcgtccctgcatgtctggaagattgttgtctccaataccccccgcaccttgcgtgagatcctacccactctctttgggctcctgctgggtttcctggccagcacgtgtgcagataagagaacgattgcagcgagaacattgggagatcttgtgcggaagttaggggagaaaatcctccccgagatcatccccatccttgaggaaggcctgaggtctcagaagagcgatgagaggcagggtgtgtgcattggcctaagtgagatcatgaagtccaccagccgggatgccgtgctgtatttctctgaatccctcgtgcccacggcaaggaaggcttngtgtgacccactggaggaggtcagagaggcggcagccaagactttcgagcagctgcattccaccatcggccaccaggctctggaggacattctcccatttttactaaagcagctggatgacgaggaggtgtcagagtttgccttggatggtctgaagcaagtcatggctattaagagtcgtgtggtgctgccctaccttgtgcccaagctgacaacgccacctgtcaacacccgggtgctggctttcctttcgtcagtggctggtgatgccctcacccgtcatcttggcgtgatcctcccagcggtcatgctggccctgaaggaaaagcttgggaccccagatgagcagctggagatggccaattgtcaggctgtgatcctctccgtagaggatgacacagggcaccggatcatcatcgaggatctgctggaggccacccgcagccctgaggtgggcatgaggcaagctgctgccatcatcctcaacatctactgttcccgctcaaaggctgactacaccagccacctgcggagcctggtctcgggcctgatccgcctcttcaatgactccagccctgtggttctggaggagagctgggatgccctaaatgccatcactaagaagctggatgctggcaaccagttggcactcattgaagagctgcacaaggaaatccggctcatagggaacgagagcaaaggcgagcatgtgccaggattctgcctcccgaagaagggagtgacctccatccttccagtgttgcgggaaggagtcctgactggcagccctgagcagaaggaggaggcagccaaagccttaggcttggtaatccgcctgacctcggctgacgccctgaggccctccgtggtcagcatcactggccctctgatccgcatcctgggggacaggttcagctggaatgtgaaggcggctctgctcgagacactcagcctcttgttggctaaggttgggattgccctgaagcccttcctgccccagctgcagaccactttcaccaaagccctgcaggactccaaccggggggtgcgcctgaaggccgcagatgctctggggaagctcatttccatccacattaaggtggaccccctcttcacagagctgctcaatggcatccgcgccatggaggacccaggtgtcagggacaccatgctgcaggccctgaggtttgtgattcagggagcaggggccaaagtggatgccgtcatccggaaaaacatcgtctcactcctgctgagcatgctgggacacgatgaggacaacactcgcatctcctcagccgggtgcctaggggaactgtgtgcctttttgactgaagaggagcttagtgccgttctacagcagtgcttgctggcggacgtgtccggcattgactggatggttcggcacgggcggagcctggcactttccgtggctgtgaatgtggctcctggcagactttgtgccggcagatatagcagtgatgttcaggaaatgatcctgagcagtgccacggcggacaggatccccattgcggtgagcggggtccggggcatgggctttctcatgagacaccacatcgagacaggcggagggcagttgccggccaaactttccagcctgttcgttaagtgtctgcagaacccatccagcgacatcaggctggtggctgagaagatgatctggtgggcaaataaggacccactgcctcccctggacccccaggccatcaagcccatcctgaaggctcttcttgacaacaccaaggataagaacaccgtggtcagggcctacagcgaccaggcaattgtcaacctcctcaagatgcggcagggtgaagaggtgtttcagtccctctccaagatcctggatgtggccagtttggaggtgctgaacgaggttaaccgaaggtcccntgaagaagctggccagccaggccgactccacggagcaggtggacgacaccatcctgacatgagaggcctgggcnagcagcagcattgccgctccacatctttgctcaatgttttcatttttgaaaatacatttgttccaatggggagcttggaagatggcgttcccagaaagtattttaatatcaatagaccacagccaaagccttaaatcaaacccacacacaactgaaaattgcctcctccatctctcaccttttcctgtggagaagagaaggaaaagcacacgcatgcgcctcagcaaatggcagcccaggagctgtttgtccagtttagcatggctaggtctggaactataatagcagggtcagactgtgggttcctcttctcctgtgcttgagctctggtttgagagctggcgctaccaacctttttcctatatcccgagtggggcacagacggtggatctctgcccagtgtggtgtgtctggcttggcttttcaatattgtgaggtctgaatggatctganccctgtcagatgaaaatgattcacagctctggcagttcccaagtctggggaggggtataggtttgaaaggctgtttgaaagaggaatgtttaataaaggctttgatttaatcttgananaaaaaaaaaaaaaaaaaactcgagggggggcccggtacccaattcgccctatagtgagtcgtt

SEQ ID NO: 444 - DNA, 3576 bp, Homo sapiens
  modified_base (3)..(3): a, c, g, or t
  modified_base (24)..(24): a, c, g, or t
  modified_base (1533)..(1533): a, c, g, or t
  modified_base (1631)..(1631): a, c, g, or t
  modified_base (2679)..(2679): a, c, g, or t
  modified_base (2713)..(2713): a, c, g, or t
  modified_base (3419)..(3419): a, c, g, or t
ttnttttttttttttttttttttnaaaatttgaacaagtatttatttcttaaaatttacttaagggattagagctaatatataatagaacatttaatataacatttggagttatgtcaacataaaaatagctgtggttacaattagcacatgcaattcactgcaaaggtaaaaatacatgctatactctagacaagccttccaaatgaagttagagtagatggggtaaaacagcaagtgaacatgaaaggattgcacttagaagaaagtgggacatagctaggatataaaagaaacatacctaatgctagtcagtcactgcattgtcctactagcaaattgcacatttatttttagagtatattcaatacacatacatattgagactagagaattttcaaatatctacctttgaaatatccctttgtttctaacacatcacattatggtattaatgtaacagcacttaaaacctgtagttatcattcaaagcttgtgttcaagagataaaagaacatcattcagacaaagcctgtgttcaagaaataaaaaaaacatctatcactatcggccttaaatgcatctcatcacacgacccatcaactttaatgaaatgggtaatgaagttaaactaaccagtttgtacaaactattgactgagaaaaagcccttaaaaatttaggaacaaatgagcaacagaagagctcaccctgagctgccaccttttaatttttaatgcaatgtatatgagaatatcatgctaatgcacatactagtagcatgtatgatggaaaaaaataggttaatgcaaaagataatacgcttggctttgtaaagttttgttttgacttacatcatctgaattctgtttatcgagtctgaaaaggaactgctgccaaggaccagtccaaagaagaattaggctgtaagactgctagttcataccttctttgaaatcaatgacaatgtccaattttaggctaatcctaaaacacttgccattttatgactccatattcttttaatttacagaaaagtacaaattttttagaaagtaatcttatcagcacaatataatctaacaatacctgtaatagaaagctatcccagtaaattttttttgaacaattgaacttttgtcttatgcagcttataactttgttattttattcatctcaacaaaataaaactttattgaaacaaaagtgtatggtttaggaatatgctcttaataacaactgagcaaaattagaatgatgtggactataacagaatgaaggaagatctctcctgcttgatgtacttggtcaatatatgttagtaaacagaaatattttagggaattctatgattattctacttctacatttacatgtcatggttttaactagttaaatgggtagaaaaaagacatctttaataattgatttctatttctcaaactagatgctctactttaaatatgagctttaatgaatgttttgtaacattttaaagttgtaacatttctaagtatactccactaacttcacantaagagctagggtcactggatgacttcatgtggtaaaatcccttatcaaggaataaggctgaaatttaaatgaacaattaggtagagaagaggtatgnacacagaacatgtgaatgaaatttgctttttttccttgctgctgttcccgagtgccgactgatccatagtaaaaaaggacaagattaaaattttaggttttaatggtacaaagtgtgaagttttatagttttctaataattattcagtattatccctttcagagatgagggtaggataccacagacatcagtaactgacaagttataatatcaacacatgtaacatttgggtcattattttataaccctaaagggagcaactgcaggtgcagaagcagtgagtgaactagttttgtccagacaaggttttctgatgtgctattactttaaacaccacttttggacactaaagatttaaagtgataaagccactaactaactttattagactagtttttacataaataaccagatttctttgcctacctaaagtacaatttacatgcatcaacacatagattattctaagacatgcttgggaaagtaattttgaatgtaaaaagttttataatttattttctccttagggcaggtgtacattacatattagtgctcaaatatatgttcatttccagaatgaatttttgcacagtaatcatatatccatttaatatgtataaagtgttcttggggatgggggtatattcactcactgtaccatgttttatacaggcttcaacatgcaaatttgtttatatcatggccttcaatgatcctccattctcattcctgtagattaagagttcatattgtatatctgaccctgaaatgtacaaacttcacactacaacattcttcatgacactatttgttatgaggaaagttgcagctaaatattagtcatgtgacttaaattttgagaaaatggaaaatgtaataggtataaatttcctgacacatacagcaagacaaatccagcccagcctttgatgatcaacttaaaagctggagatgtcattatcttgttgtgtaaatttgggtctatccctacctttacttctctgtgcctgattttcctcatctactttgaattcgtcattctattaantctacttttgcctaaagtgggaaactgaatatantcagaatgaaacatctatttttttcataaagaagatcatataatatgtgaaagaactttgaaaggatgaggcattatataaatgcaagaatataaaagataaacaggaagtctaatgtgaacaatattctgagagtaaaaagtgtaattatatttccattgtaaatgtataccaagttttcttagctttctattctccaataacctctagaaactattctaagcatgcctggtttctgtaacttaaatatggcataaaaacctgtttcctttgaattcacttgatagcagtagtcaatcactaataacgcttgctaatttcctcttactttctaagaaaacccctatatttagcatctgcttccatatcgcacgtggtggttaggggacagcataagtacactagcggctttagcactaaactcgaggcctgggtcacttctcccttgaagaaaaaaggttttaaaaattcctaaatcacaatgtagaactaagttccaccctacctcagaactgcagacattaaaataccatctctttattaagtgtctctacaataatgatatttgctaagaacaagatgtacattttttggggttctgttttgttttggcaaatattgcccaagttgtcttagtgtgcctcaaacatttactaaaaataaaaaaatttaaatctttgcctacttatttaaaaataaaaaaaantactcaaaacaaatttaagctgaagatatatactgtataaagtgttcatctacccagtactctgaagtcttaagaaaagtcaatgatatgtgtgtgtatatgtgtgtgtatatatatatatatatatacacacattagcaatttaagccttttaaca

SEQ ID NO: 445 - DNA, 3576 bp, Homo sapiens; identical to SEQ ID NO: 444
  modified_base (3)..(3): a, c, g, or t
  modified_base (24)..(24): a, c, g, or t
  modified_base (1533)..(1533): a, c, g, or t
  modified_base (1631)..(1631): a, c, g, or t
  modified_base (2679)..(2679): a, c, g, or t
  modified_base (2713)..(2713): a, c, g, or t
  modified_base (3419)..(3419): a, c, g, or t

SEQ ID NO: 446 - DNA, 2911 bp, Homo sapiens
  modified_base (50)..(50): a, c, g, or t
  modified_base (63)..(63): a, c, g, or t
  modified_base (79)..(79): a, c, g, or t
  modified_base (99)..(99): a, c, g, or t
  modified_base (111)..(111): a, c, g, or t
  modified_base (129)..(129): a, c, g, or t
  modified_base (214)..(221): a, c, g, or t
  modified_base (817)..(817): a, c, g, or t
  modified_base (831)..(831): a, c, g, or t
  modified_base (957)..(957): a, c, g, or t
  modified_base (1074)..(1074): a, c, g, or t
  modified_base (1208)..(1208): a, c, g, or t
  modified_base (1227)..(1227): a, c, g, or t
  modified_base (1698)..(1698): a, c, g, or t
  modified_base (1700)..(1700): a, c, g, or t
  modified_base (1765)..(1815): a, c, g, or t
  modified_base (2252)..(2252): a, c, g, or t
  modified_base (2254)..(2254): a, c, g, or t
  modified_base (2264)..(2264): a, c, g, or t
  modified_base (2300)..(2300): a, c, g, or t
  modified_base (2708)..(2708): a, c, g, or t
  modified_base (2715)..(2715): a, c, g, or t
  modified_base (2720)..(2720): a, c, g, or t
  modified_base (2728)..(2728): a, c, g, or t
  modified_base (2738)..(2738): a, c, g, or t
  modified_base (2752)..(2752): a, c, g, or t
  modified_base (2784)..(2784): a, c, g, or t
  modified_base (2828)..(2831): a, c, g, or t
  modified_base (2853)..(2854): a, c, g, or t
  modified_base (2856)..(2861): a, c, g, or t
tttttttttttttttttttttttttttttttttttttttttttttttttntgctatgcaaggntttatttacaacttanatgactctatgattgctcanaatctgacacanactaataagtttcattgnctgaaaatactcataaaatacctcatctccaaaataattcaaatacataattaaatgaacgtttttaaaatgagagttttcagannnnnnnntttttttttttttagtaaatatatgttttatttgtcaagagtaaatgtcagttttatttagaatattcaagtacaaaaaatgaaaatgtatatatctatgactgttaagaaatgttagaaatcattaaaatgttctgagaataccagtaaggcactgaatgcaaataccacctgaaatatgaattatgtgcatttttatatctttaatattcagatgttcatagttattttcttaaaaagtatttttaataaaatgattcaaccttattatttttaccctggaagacagagtttaaacaagtatgtaatgaaaagttttcctaatgaaagctgtgatacactcatgctcaaaggtactttatccttaggaaaaaatagcttatatatctggatgttttaacttttaaagatattttgtttcaccacagtaatacgtcagccataataaggcataataaagcatgaagtcatcatattaaataatctgacacaaaagcttaagatcatatcaccaattgggtaattgtataaaaaatttttaagttctataaaactattaagaggttagagttttagctccataatacatcccaaancatattccccaaantttttagcatatataaaaaaggttcatcttggaatataaatgtaatcagatagccacgatattaatgggttctgtattttcagtggcactgacttcgctctttggtataatgcactgcagtgacantagcttggtagcaagagaaaagatttagattcatcacagaacagcaacttaaacatttctaacaacagtgaatatatatgaatatataggtacaagctgagtatcccttatccaaantgctagggaccagaagtgttttggatttcaggtttggaatatctgcatatacacaacgggacccgactctaattacataattcatgtttcacatccaccttatacatatagcctgaaagtaatttatacaaaanttttgtgcaagaaacaaantctgtttaaactgaaccatcagaaagcaaaggtgtcgggtggggaattttccacttgtggggtcaagtcagtgctcaaaaagattcagattttgaagcttctggatttcagatttttgaattagagatgctcaacttgtagtatcattcactctggcttatgtattgaccttgtacttgaaagtacttttccataaatatcagtaactgtggctgttcaccaaatatagaagtgataaaacaaataacagcaaaatcaaagcacacttctagtttttttttaataaagtttgcttgtgatgatgaccttctgtgctctggaacttctgttttacaaaaaattggagttcttacggtccttgtccttcctcaggttgctgcctgttgccagaaaggactggctgtgaaatatctcggaggtagctttctttttagagaaagcaattatttcttcttccaaaagtcttctctntntcttcaagcttcattctctcttcttggtgaagtctcttaaggtgctcaaatttggcctgtagctnnnnnnnnnnnnnnnnnnnnnnnnnnnnnnnnnnnnnnnnnnnnnnnnnnngactggcttgttttctgggcccacatctgtaaagcccatttcctccagtttgcagcgcctgtaaagctcatagtgcctggtatgggtctgctctcgcaggtcctccatatttgtacaaatgagcatttcccgcagctttacaaagtcacagtggttttcattttccacttgtacaacaccccaagggtactggcgagctttgaccatcttgtttccgacttttacctcatccatacttcccacaacagcaaacggcaactgtccattcattgcagcgttgaccttagcaatagtgtcatcatccgttgggaactggtatatctggacgccattgctgaccaattcactcatgagcttgatcttaaacttctgtaattcagttttagaaaccgtatctgctttggcaatcactggtataatgtttaccttgctgtcangnttcttcatgnttaagagatcaagtgtcttcagagagtggcctgtcngtgaaatgaagtagaggcacacacggatgcgagaatcagggtaggtaaagagagaacgtttaatcttcagttattcttggagacaggcctcaaactgagcatctatgtagtcaactatcggttggtagctctcttctttatttatttggtcaccaaatcccactgtattcacaatggtcaatttcaatcgaacattactttcctggagttcatatgtctgaactttaagtttaacatttgggcaaaatgtgaggattcatagtcttccaattagtattaaacatgtgtcaatcagtgttgattttccattccagtttcccccacacagaatattaaagcagaaaccttgctgaacggatctgttcaccagctgatcaggcaaattctcaaaccaacatggccagacanagtcaangaacngaatgttntctctttttntctgttcatcatcngatccttgtgaagacatacaagttgttttcgntgccatgtgagactgaaagagcaggtgccgcgccacctcggagnnnnccatggtcgcgggcaggggcanngnnnnnngcggctgtatcaggcccggccccgagcggctggtcccggcgacggcggcg

SEQ ID NO: 447 - DNA, 2762 bp, Homo sapiens
  modified_base (89)..(90): a, c, g, or t
  modified_base (459)..(459): a, c, g, or t
  modified_base (488)..(488): a, c, g, or t
  modified_base (508)..(508): a, c, g, or t
  modified_base (631)..(631): a, c, g, or t
  modified_base (670)..(670): a, c, g, or t
  modified_base (782)..(782): a, c, g, or t
  modified_base (867)..(867): a, c, g, or t
  modified_base (923)..(923): a, c, g, or t
  modified_base (942)..(942): a, c, g, or t
  modified_base (981)..(981): a, c, g, or t
  modified_base (988)..(988): a, c, g, or t
  modified_base (993)..(993): a, c, g, or t
  modified_base (1010)..(1010): a, c, g, or t
  modified_base (1078)..(1078): a, c, g, or t
  modified_base (1883)..(1883): a, c, g, or t
  modified_base (1896)..(1896): a, c, g, or t
  modified_base (2049)..(2049): a, c, g, or t
  modified_base (2545)..(2545): a, c, g, or t
  modified_base (2651)..(2652): a, c, g, or t
  modified_base (2697)..(2697): a, c, g, or t
  modified_base (2700)..(2700): a, c, g, or t
  modified_base (2702)..(2702): a, c, g, or t
  modified_base (2704)..(2704): a, c, g, or t
ggtgggtgcctgccagcagctgaggcgccatggcggcggcagcggtgtcagagtcttggccggagctggagctggctgagcgcgagcgnncggcgggagctgctgctgacggggcccgggctggaggagcgagtgcgggcggcgggtgggcagctgccgccgcggcttttcaccctgccgctgctgcactacttggaagtgagcggctgcgggagcttgcgcgcgccggggcctggcctggcgcagggcctgccgcagctgcacagcctcgtgctgcggcgcaacgcgctggggcccggcctgagccccgagctcgggccgctgcctgcccttcgggtgctcgacctgtcgggcaacgcgctggaggcgctgccgccgggccaaggcctgggccccgccgagccgccgggccttccgcagctgcagagcctcaacctcagcggcaaccggctgcgcganctgccagccgacctggcgcgctgcgcccngcgcctgcagagcctcaacntcaccggcaattgcctagactcctttcccgccgagctctttcgccccggcgcgctgcccctgctcagtgaactggcggctgctgacaactgcctccgagaactcagccccgacatcgcccacntggcctcgctcaagacgttggacctctcgaacaaccagntgagcgagatccctgcagagcttgcggactgccccaagctcaaggagatcaatttccgtgggaacaagctgagggacaagcgcctggagaagatggtcagcggctgccagancagatccatcctggagtacctgcgcgtcggaggccgtggtggcgggaagggcaagggccgtgccgagggctcggagaaggaaganagccggaggaagaggagggagaggaagcagaggcgggaaggtggtgatggggaggngcaggacgtgggagatgcnggccggctgctgctcagggtcctgcacgtctctgaaaancccgtanctctngacagtcagagtgagcnccgaggtccgggatgtgcggccctacattgtgggggccgtggtgcgaggcatggacctgcagccaggnaatgcactcaagcgcttcctcacctcgcagaccaagctccacgaagatctctgtgagaagaggacggctgccacccttgccacccacgagctccgtgccgtcaaagggcccctgctgtactgcgcccggcccccacaggacctcaagattgtccccttggggcggaaagaagccaaggccaaggagctggtgcggcagctgcagctggaggccgaggagcagaggaagcagaagaagcggcagagtgtgtcgggcctgcacagataccttcacttgctggatggaaatgaaaattacccgtgtcttgtggatgcagacggtgatgtgatttccttcccaccaataaccaacagtgagaagacaaaggttaagaaaacgacttctgatttgtttttggaagtaacaagtgccaccagtctgcagatttgcaaggatgtcatggatgccctcattctgaaaatggcagaaatgaaaaagtacactttagaaaataaagaggaaggatcactctcagatactgaagccgatgcagtctctggacaacttccagatcccacaacgaatcccagtgctggaaaggacgggccctcccttctggtggtggagcaggtccgggtggtggatctggaagggagcctgaaggtggtgtacccgtccaaggccgacctggccactgcccctccccacgtgactgtcgtgcgctgacgccagggccgcctgtccgcgtttgtttggccggttttgcggaggtttctatgcggcaatgctgaattatccgttagattttcaccccagtttttttgtnggttttttttttngagatggagtctcgctctgtcgccaggctggagtgcagtggcgtgatctcgagtcactgcagcctgtgtctcctgggttcaagcgattctcctgcctcagcctcccaagtagctgggactacaggtgtgtgccactaagctcagctaattttngtatttttagtagagacggggtttcaccattttgaccaggatggtcttgatctcttgacctcatgatctgtccacctctgcccctcaaagtgctgggattacgtgatccacccgcctcagcctcccaaagtgctgggattacaggcgtgagctgtgcctggcccaccccagcattttttaagatgtatgtattcgttgttctgtttttccagatgattctgtcgtaaagtgatgctatgttgtcgttacaacatcaaagtgattttacggtttttgatgggattattcaagtgtcagaattaactgttcaaaatgttctgaatcatgtagatacatggcaggtaactgtttatgggagaaaagtacagtgctgttacgtggcactgtacagtcatgtgccacgtaacagcgtctgggtcagtgacggacacttacctgacagcggatccacaatattctcgtgcagtgtgtttggaatcctggtctgggctctcgncgttggccttgtagatcaagtaggggaagtgagtgatgttcagtcatgctgctgggacacttggttttccagatgaaaacacataaataaaactacatgcaccatnnaaaaaaaaaaaaaaaaaaaaaaaaaaaaaaaaaaaaaaaaaaaanagngngngagagaagaaaaaaaaaaaaaaaaaaagaggaaaaaaaaaaaaagaaaaaaaaaaaaa

SEQ ID NO: 448 - DNA, 1632 bp, Homo sapiens
  modified_base (6)..(11): a, c, g, or t
  modified_base (13)..(15): a, c, g, or t
  modified_base (51)..(51): a, c, g, or t
  modified_base (731)..(731): a, c, g, or t
  modified_base (1600)..(1602): a, c, g, or t
gaccannnnnncnnnggggctggcgggcggcggggtccgcggggccgcagnagatgacggccggcggcaggccgaggccgagggcgctggcggggagcccggcgcggcgcggctgccctcgcgggtggcccggctgctgtcggcgctcttctacgggacctgctccttcctcatcgtgcttgtcaacaaggcgctgctgaccacctacggtttcccgtcaccaattttccttggaattggacagatggcagccaccataatgatactatatgtgtccaagctaaacaaaatcattcacttccctgattttgataagaaaattcctgtaaagctgtttcctctgcctctcctctacgttggaaaccacataagtggattatcaagcacaagtaaattaagcctaccgatgttcaccgtgctcaggaaattcaccattccacttaccttacttctggaaaccatcatacttgggaagcagtattcactcaacatcatcctcagtgtctttgccattattctcggggctttcatagcagctgggtctgaccttgcttttaacttagaaggctatatttttgtattcctgaatgatatcttcacagcagcaaatggagtttataccaaacagaaaatggacccaaaggagctagggaaatacggagtacttttctacaatgcctgcttcatgattatcccaactcttattattagtgtctccactggagacctgncaacaggctactgaattcaaccaatggaagaatgttgtgtttatcctacagtttcttctttcctgttttttggggtttctgctgatgtactccacggttctgtgcagctattacaattcagccctgacgacagcagtggttggagccatcaagaatgtatccgttgcctacattgggatattaatcggtggagactacattttctctttgttaaactttgtagggttaaatatttgcatggcagggggcttgagatattcctttttaacactgagcagccagttaaaacctaaacctgtgggtgaagaaaacatctgtttggatttgaagagctaaagagtctgcagcaggattggagactgacttgtgactgcgggctgggggggcattcccagtaggaatgtgaagccagaggtttcggattcgtgacatccaccccctgggcaagtgagagcatctgcaaaatgcaaagagaactacctcatatgcaggatgagccaatggcagtctcaagaaatgtactcgggcgacaccttacctgtggaaagcaaatcttttcaaaataagccactgggactcggtaggtggagccccagctgctcttctagggacctatggggccttcgtggcatctctgtgctgtgtgctggggaggaggttgatgtaatggtgactcttttctgatcagcaccttggccgtgattcccaaggtcccagccaaagcaaagggccagttgtttcagtttaaacagacatgtctttagtctaataaaattagttaactgccagtaaagttatttgttagctttgatgaaagctatgttggtatctttccctaatcatcaaagtaaataaaaaatcatttctannnaaaaaaaaaaaaaaaaaaagggcggccgct

SEQ ID NO: 449 - DNA, 1829 bp, Homo sapiens
  modified_base (94)..(94): a, c, g, or t
  modified_base (161)..(161): a, c, g, or t
  modified_base (221)..(227): a, c, g, or t
  modified_base (962)..(962): a, c, g, or t
  modified_base (970)..(970): a, c, g, or t
  modified_base (981)..(981): a, c, g, or t
  modified_base (1006)..(1006): a, c, g, or t
  modified_base (1027)..(1027): a, c, g, or t
  modified_base (1077)..(1079): a, c, g, or t
  modified_base (1081)..(1082): a, c, g, or t
  modified_base (1086)..(1097): a, c, g, or t
  modified_base (1104)..(1105): a, c, g, or t
  modified_base (1108)..(1108): a, c, g, or t
  modified_base (1613)..(1613): a, c, g, or t
  modified_base (1761)..(1761): a, c, g, or t
ttaaatgctctttgccagatattctcctgcagctctaaggaaaggaaatcaatttaaaaataatttgtagaatctactattgagccaccaaagnataattccctaaaagtttaagaaaccctggcaattaattcagcataaacatatcctataaacagcangagaggttcagctttctgattttactgtggaccttttcctaagggcattcatgaatgcannnnnnnttttaactatggcttacatttattttaaatttcactaaatacaaatcttgattgtcatgccagttttagatcttattaattttcagaatggataaattcaaataatcataaattacggtaactttttattataccaaggtgttctaatgccatcatatgaagacagatgcttcaaacaacctgcattaaattatatttttaataaaattaaaatctatttttaacctatttgtagtcacaaaccgaaaacgtgtcgtctttaccttagagctaaaggcttactttatgcatacggtatatttaatagtctacaaatcaaagatttaaacagtcccttaaaaattccatatattctcataccaactcatctacatagaaatgaaaatctctattgttctcacaaaccattaccatgagttcactataacaactggatcaatatggcttgcctttcaaagttaaagaatcagaaaggggcctgtaagaagtcatttagcccaattccctcaccctgtgtgttttccctcaaagccagtgcaatttttttttaaccaaaaaactggacatgtttaatacatacagtttgacaaatttggatttcactctttgttttgatgtagtaactcttttataaaagggaacagattcagacaagctcagtggcccaactgaagacattcagcaattaatggcaggacttcagtaatcagtggcaggactacaacatacatctcnttcatgcntagggaaaccnaggctctctattataaagctgaccnagggctattgttttccccttntctctcatcctaaacaccattcatatttttcctaggtcacattttagtgnnntnntttnnnnnnnnnnnnttttttnnttntcatgttttaccttttttattgaattatatacacctcttacaaaaatgcttgaagtaatttaacacctgtacatcagtacaaaacctggctgagtaaaatgaagagaggatctattcaagatcattaagaccaaatgtaaactgggaagtatgtggaagatagctgtccagcaagtgtctggaaggtgttctagctgggtagagagcctattctaacagacacgcacatcgcagaaagcagcatgaacagaaccacatcctagataagagttctgtgtacagaagatccatggaggcaagtgctgtcaggaaggacactgcctccctccaccctcccaaatgtcaccaccaagttccttcaggtgagacctcacacaatgtcaagtgctttctaggaaatactaagatcaggttgagagattctgcttggtctagtcaatctgaaaaattcaggctggaaagacaccttttctcaagagctgaattgacttttgccttcaaatcntgcctgcaccttgcctacgatggcatcaatttacacctaaggacctttgaagagaaaaattccattatttcttttctttcttgagagcagattttttccctcctcctttggaagatttgcagtactttgcttccatctgagccagaanattgtccatttccttttgccgatccttttgtctgctctgtttgagaagttaaaacacaagctttcaaa

SEQ ID NO: 450 - DNA, 1531 bp, Homo sapiens
  modified_base (259)..(259): a, c, g, or t
  modified_base (261)..(261): a, c, g, or t
  modified_base (263)..(263): a, c, g, or t
  modified_base (265)..(278): a, c, g, or t
  modified_base (280)..(280): a, c, g, or t
  modified_base (797)..(797): a, c, g, or t
  modified_base (1155)..(1155): a, c, g, or t
  modified_base (1165)..(1165): a, c, g, or t
  modified_base (1170)..(1170): a, c, g, or t
  modified_base (1184)..(1186): a, c, g, or t
  modified_base (1189)..(1195): a, c, g, or t
  modified_base (1198)..(1200): a, c, g, or t
  modified_base (1220)..(1221): a, c, g, or t
  modified_base (1223)..(1223): a, c, g, or t
  modified_base (1225)..(1226): a, c, g, or t
  modified_base (1228)..(1231): a, c, g, or t
  modified_base (1234)..(1236): a, c, g, or t
  modified_base (1238)..(1241): a, c, g, or t
  modified_base (1243)..(1244): a, c, g, or t
  modified_base (1246)..(1246): a, c, g, or t
  modified_base (1249)..(1249): a, c, g, or t
ttttaagcgacacctttccttttattagattcacaatgcctttgtaactttaaccactcctttgtagaatttttctttgttagaaaacagacaaactctgtccttaggaaccgtcttctacttggtacagcactgcctcagccgcctgcatcgcgtgaccagtaagaatgaagtccagcagcatagagaaaagattcataaaggctgggaggtcatcccccagggcctcccctacttcacatacacagagacgtgtgcntntntnnnnnnnnnnnnnntnttatatatagatatgtatttttttttttttttacaaaaataacagggtttgcacagctctattaattttttaaaattacacaggcaaggtttatgcttcagtataaccatttttactttggatttaagtgggaattttaggcctaaaaataagattaccaagcagaggccatctagccacacagacacaagacatcttgagctccatgaaactagaaatgtggtgatgtcatcctcacacgggggggctacacatccccatcgattattttaactaaaatacaaaagcaaaatagtgtgttaaaataatcctctactcaatgcattagcacatataccaaattatactatctgcatgacagtctctaggtaccaagactgtatttttgcaagtgctattctctacttcattaaatacagtacccagccagcaaccacaaaaagagaacgcatgctgtacagcaagagaaggggagggagacgattttcagggccataacttccatggcaaccaaaanaaaaataagtaagacaaatctcacatgacagatataaaactaatttgcagtgacatttgatatatagttttatcagaagtaatacatttaggttacagttacatgaaaaagagaaactatgtgaaattataggctttctcctagaatatccaaaatgctcatcaacagttaattagtacaagaaagatgaccaccaggtgattgaatagacagaatgtcatgtagtattttaaaaacacagattctgggactagaagctaccaccaaaatatccagaaatctgagttaacaggtcctttattttgcacacttgctgctgatatatagaaccacgaagtgtttgcacagaccacgaatncagccgctancctanaggctggtcacagnnnagnnnnnnntgnnnaccgtcctgccagtgtgagnncngnntnnnngannngnnnntnncnccncggtcggattctggaggagggaggcatcttggcctgcagtaagcggtgctgacgggactctggccacagaggtcaggcctcctgaaaacagcactgccttccgcgctgccccagcttgccccattccttgtccgccaacccaccgtgattcatcttctgaagctgggagtgaaactgggtcagctgtaacctgttcctattcatctggaaggagggaggcttggatgagcaggggatgagagctgcagggaaataaatgagatattcgtccttaaaaaaaag

SEQ ID NO: 451 - DNA, 1844 bp, Homo sapiens; identical to SEQ ID NO: 203
  modified_base (13)..(15): a, c, g, or t
  modified_base (51)..(51): a, c, g, or t
  modified_base (58)..(58): a, c, g, or t
  modified_base (60)..(61): a, c, g, or t
  modified_base (63)..(63): a, c, g, or t
  modified_base (72)..(74): a, c, g, or t
  modified_base (78)..(78): a, c, g, or t
  modified_base (87)..(90): a, c, g, or t
  modified_base (93)..(93): a, c, g, or t
  modified_base (95)..(95): a, c, g, or t
  modified_base (390)..(390): a, c, g, or t
  modified_base (415)..(415): a, c, g, or t
  modified_base (1024)..(1025): a, c, g, or t
  modified_base (1035)..(1036): a, c, g, or t
  modified_base (1039)..(1039): a, c, g, or t
  modified_base (1048)..(1050): a, c, g, or t
  modified_base (1054)..(1055): a, c, g, or t
  modified_base (1293)..(1293): a, c, g, or t
  modified_base (1320)..(1320): a, c, g, or t
  modified_base (1326)..(1326): a, c, g, or t
  modified_base (1372)..(1372): a, c, g, or t
  modified_base (1380)..(1380): a, c, g, or t
  modified_base (1386)..(1386): a, c, g, or t
  modified_base (1466)..(1466): a, c, g, or t

SEQ ID NO: 452 - DNA, 2093 bp, Homo sapiens
  modified_base (42)..(42): a, c, g, or t
  modified_base (47)..(47): a, c, g, or t
  modified_base (54)..(54): a, c, g, or t
  modified_base (59)..(59): a, c, g, or t
  modified_base (61)..(61): a, c, g, or t
  modified_base (63)..(63): a, c, g, or t
  modified_base (69)..(69): a, c, g, or t
  modified_base (71)..(71): a, c, g, or t
  modified_base (84)..(84): a, c, g, or t
  modified_base (89)..(89): a, c, g, or t
  modified_base (92)..(92): a, c, g, or t
  modified_base (100)..(100): a, c, g, or t
  modified_base (107)..(107): a, c, g, or t
  modified_base (112)..(112): a, c, g, or t
  modified_base (115)..(115): a, c, g, or t
  modified_base (118)..(118): a, c, g, or t
  modified_base (121)..(121): a, c, g, or t
  modified_base (124)..(124): a, c, g, or t
  modified_base (127)..(127): a, c, g, or t
  modified_base (133)..(133): a, c, g, or t
  modified_base (137)..(137): a, c, g, or t
  modified_base (140)..(140): a, c, g, or t
  modified_base (144)..(144): a, c, g, or t
  modified_base (150)..(150): a, c, g, or t
  modified_base (156)..(156): a, c, g, or t
  modified_base (162)..(162): a, c, g, or t
  modified_base (165)..(165): a, c, g, or t
  modified_base (169)..(169): a, c, g, or t
  modified_base (174)..(174): a, c, g, or t
  modified_base (181)..(181): a, c, g, or t
  modified_base (200)..(200): a, c, g, or t
  modified_base (207)..(207): a, c, g, or t
  modified_base (235)..(235): a, c, g, or t
  modified_base (247)..(247): a, c, g, or t
  modified_base (253)..(253): a, c, g, or t
  modified_base (274)..(274): a, c, g, or t
  modified_base (279)..(279): a, c, g, or t
  modified_base (281)..(281): a, c, g, or t
  modified_base (308)..(308): a, c, g, or t
  modified_base (347)..(347): a, c, g, or t
  modified_base (350)..(350): a, c, g, or t
  modified_base (387)..(387): a, c, g, or t
  modified_base (447)..(448): a, c, g, or t
  modified_base (454)..(454): a, c, g, or t
  modified_base (461)..(461): a, c, g, or t
  modified_base (467)..(467): a, c, g, or t
  modified_base (471)..(471): a, c, g, or t
  modified_base (598)..(598): a, c, g, or t
  modified_base (713)..(713): a, c, g, or t
  modified_base (732)..(732): a, c, g, or t
  modified_base (738)..(738): a, c, g, or t
  modified_base (743)..(743): a, c, g, or t
  modified_base (764)..(764): a, c, g, or t
  modified_base (766)..(766): a, c, g, or t
  modified_base (1155)..(1155): a, c, g, or t
  modified_base (1164)..(1164): a, c, g, or t
  modified_base (1170)..(1170): a, c, g, or t
  modified_base (1172)..(1173): a, c, g, or t
  modified_base (1177)..(1177): a, c, g, or t
  modified_base (1179)..(1180): a, c, g, or t
  modified_base (1417)..(1417): a, c, g, or t
  modified_base (1425)..(1425): a, c, g, or t
  modified_base (1437)..(1437): a, c, g, or t
  modified_base (1458)..(1466): a, c, g, or t
  modified_base (1468)..(1468): a, c, g, or t
  modified_base (1470)..(1471): a, c, g, or t
  modified_base (1743)..(1758): a, c, g, or t
  modified_base (1962)..(1962): a, c, g, or t
  modified_base (1966)..(1971): a, c, g, or t
  modified_base (1973)..(1976): a, c, g, or t
  modified_base (1980)..(1984): a, c, g, or t
  modified_base (1987)..(1987): a, c, g, or t
  modified_base (1990)..(1990): a, c, g, or t
  modified_base (1992)..(1993): a, c, g, or t
cccacgcgtccgcccacgcgtccggacagacctaatgctctnattanagttcancctgncnancagaanancagttcatcattnccccntgncatattcnttttccntgctngcntantcncangangaaatncagnccntcangcgccnctgaanagcttnccntttntccgnagcaggntgtcagggcagaaaccaancaaaggntcatgcttcaccccttcctccatctgcntgcacctaccanctgatntctacagattccataacaggnacagnanattcaagacagagagaagaagagctgnaattaatagaccaactgcgtaaacatattgagtaccggntgnaaagtgtctctaccttgtgatctcggagcagctctanactgacggtgttgttctttgccatttggccaatcatgtgcgacctcgatctgtcccaagnnattcantgttccnctcacncagnctgtacctaaattaacaatggcgaaatgcaggcgaaatgtggaaaatttcctagaagcttgcagaaaaattggtgtacctcaggagcaattatgtttgcctctccacattttagaagagaaaggttngagccaggttgcagtgacggtccaggctctcctggaacttgccccacccaagcaacagcagcaccagttatctgctgtttgaggatccccaggacggtgggcactggcctggccnaaacaaggaacaggacacngtgatngctgntgccagctgtctgcttaaacnangctcttgtgtgttctcagaagggaccgttcccatgattcctaacaggaatattttgcttcatttctccattttaggggaggttatttccatttccattgaatttttttacgaagacaccattggttttctcagatgaaacttctcttactgaaaacccagcacctaacttggctgtgttttcctggagagcaggcgtgtttcacgtgccagaaagcacatcttctgtgttaggcacaagcatgctgtgccattgtttttacctggtctcaagacaactggtctgctggtttctaaacttggttgttcattagactctcctggagtatttgttaaaatacagattcacattcagtagagctggggtaaggcctaggaatctgcattttcnacaaccatngcacangnntttntnnttgttggagaaggagttctgctcagtcgcccaggctagagtgcagtggcataatctcggctcactgcaacctccgcctcccgggctcgggcgattctcctgcctcagcctcccgagtagctgggacagcaggtgcccgccaccagcctgaccaacatggagaaaccccgtctctactaaaaatacaaaattagctgggcgtggtggtgcatgcctgtaatcccagctactcgggagnctgaggcnaggagaattgcnttgaacccaggaggcggaggnnnnnnnnngncnngatcgtgccattgcaccccagcctgggcaacaaaagcgaaattccatctcaaaaaaagaaaacgcgccccatctcgctccaccacaagcgcctttatatactcaatgatgggtggaggaaaagggcccaagggctcacaccgcacaggagcctttactcaagtttcagctagttttccttcccctgcattttgaactccttttagttgttggtgatatcctttggtgttcactgcctttgtaaaacaagtaaataaagtaagcggaagatannnnnnnnnnnnnnnnagttgttaactgttctggattttctttacaatgcatccatttgggcataatgttatccctctttttatcaggtaaatgtagcatctaaaagtagctttggatcaaatcatgttgaatacctggtcaaagtaatgttttcttccttgttcttgcagagaaacaaattcatcagaacattaccacttgaccaggtttaaaattgtntaannnnnngnnnntggnnnnncangcntnnagtcccagcactttgggaggccgaggcaggaggatcacttgagcccaggggtttgagagcagcctgggcaacatagcaagaccctgtctcccaaaaatta

SEQ ID NO: 453 - DNA, 3339 bp, Homo sapiens
  modified_base (2717)..(2717): a, c, g, or t
acagtataaccgttacattttattattagttattgttgtcaatctcttaaggtgcctaattcataaacttaatcacaggtatgtatgcataggaaaaacagtatgtataaggtttgttattatctgtggttttagacatccactgggggtctggttttagatatccactgtatcccctgtggataagggggtaactgctgtatcttttagtagaagcaagagcagccccatgtgggagctaacactggacactggtcagtttcagctcctcatgcaaagtgagggtatccttgtggctccagccctggggccccctgcggtcacctttggctccacagtctggttcttgaacccaagggcagacagcttgctacagcccaggcctgaggatgcacttccttcaccaggacccacaacccctgcccatgaagacctgtggagctcagggcatcccctgatgcaggttggtcaggacctgcccagcttgcaccagcaggttctgcgtctccatctgacctggcagaccttgcactcttccacccactgtggaggactaagtgtcttgaacttccagaacacagccagggccccatacttggcctggggagaagttgggaggcctaagcagtggttgggggccacagcaaggcattgcacacagtggtttttatttctttcagggatttattaaggcattgagcacagtgtaatttctagccaagtgaaatgaatccaaggaaatatatcaggacctgagggatgtttttttaaagttactggaaaggatgatgagctgagagcacgtgtacagccacgcctgtgcgcagcgcccactctgtgcaataaacatgttctgcccatgttcctcagtcaggaggttcaggctcccggagagcacctgagggttccatcactttggtgcccaacaagcacatgcccccaacctggtgccaagaggcaggaatgacccccataccacatagctgcaggaaagcatccacggatggagggactcagctggcctggccgcagtgtggagcacagaggtatgaggcaagcaagggcagatctgagagcctgtaatgctaggcaggtgcagctggtgcgaggcgggctcccaccaggtgtaaggaaggtgggagccacagcctcttcctgggcccagaagcagccggcgccaggagatgcaggcccagggaatctgtctaaggcagctgggtctgcaccagccttctttccactcacaactcactgctcctgggagagcaggaggggcacacctttaaagagaaactgataagggaggaaaggcaggaggagatgaggccagccccactgatgacaccttgggccaggcctcacagctgcaggcatcagccggaaactccaggctgctcatggtcactggcggtgctgaactgtctctccactttcttttggtccttgatcttgagtccaatgtccactctcttctcaaagaagttcaccagcacggactccgtcaggatggaggccaggatctgctcaaaggagatgcaccagtcggtgtcgacggtgccgccgatgcgcgctgtggggctgcaggcctccccgcccaccagcaccgtgtcgtctgcaaggtcttcacattgcagggagcccgtgctgaccaccgagtaggaggacatggacatgtcgtctttggtttcatcgtcagacagcagctgggagggtgagccctgtccctcgccgctgcccccctccaccaccacctggctctcctgtggggcttttccgaggtgtgtgtctccgcctgctttggcttgggggtctcctgcagctgggggctgaagctccctggctgcgtcctgatgcagttcgggtgctggtggctcgtcctcctcagtggcacagtccctgggcttcctgcctgtgcgggctgagaacttcttccccacctctccgatgcggagcaggaggctggccacggtggcgatggcgtggtacaggtcctgctccatggggtcttcactgaacatgttgtaaagcgtcttgcacagctcaatgaactgctcctggttcatcttgggaagatccttaatcgtctccttctgagcctctttctccttggcccacattcgaaggtagtgccgatagtccggagagctggtccccttctcctctcctctctcctcacttccacttccttcttgctcttcctgtggtagtgcttcttctgaggagctgtcctctgtgaaataatgggccgcctccagggctgactcggcttcctctgggctcagagctgggggaaggtgtagcttgtagagcaccttgagcttctctgtcaggtccccgtggtacatcccgctcatccctgtcacgaactccttgaagttgatcagcgagtccttgttttcgtccaggagcctgaacatgcgccctgccagcagaggtgtgtgggagccacaggcccagggtgtcaggctggcaaagagttcccggaactggctggcatcaatccggtactgctccaggtagggcaggctggggtcccgacggccggccattgtgcggctgcacccccagtactggctagccaggtgcttggccttaaacaccatgtaaaggtcctccagctcttcaatggagaaaccaatgtccacaggtatagctcggaccacactcctcttggccgtgtcctccaaggactggatcactttcagcctctgtttaanccgcatctgctcaatgtcttcggccctcaggctgctgaatttctcataggaacactttcaggagctcaaagatgtccacctctgcaggagtagtaattcaccagcttctcgccctcaggcatcccttctgcgttccgcatcgttcagctcagcctccttgaacttcccggggtcctcgtctccactggggctgcaggttcttgttctcttcgtgcagatgattccagtgtatcgttgcccttgacgaaggtggtgatatcgtccgtcacatgtcgaagatggacagtgtctggagcaagttattttccagccattcccagtgttttgtgatctctttgcagggaagaaccacacgccactgtccagtagacactgggagtcctgggtctggtgcaggatgcaggtaagggcccacagcgggcactggagtccagcacacacgtcacagggtgcccacgagaagacccagtaaggcacagccagctccctgaccagtggccaccaggcagtcagcatgcaagcacagatagaacggggttggcccagctccgtcacccacagcgcattggccaccagcacactcactccgggctcagccacatcacggagccgctcgcaccgg

SEQ ID NO: 454 - DNA, 2738 bp, Homo sapiens
  modified_base (2453)..(2453): a, c, g, or t
ctttctacaaacaacccttcgctgacgtgattggttatgtgtatgttgcaaaactaattcctttttctacatctgattctttctacttttgtttagagttaatgctccttttatgtcacaagttgctttgctttttaaattatttcaaattggcactttgggggctgcctaagaattgataagcggggtatgatctgttgatgaatcttccagatttgtgactccctgcatcctctgatggccatttttcatatttggggttttggagggaagaaagctaactcgctttcaaaatgtgtcatttgcgatcttatctgggaacggtttgaggctcgggggaactctgctctcttgctcttggctgccatcactgctgccatgccctgttgcctgcctgcctcaggtgggaaggaggtttccccacctgggagcaggtggcagtcccaggtggttaggagccagtgagcagcagcaccttgcattgccaaaatcagagctgtggggcagcatttttccatacttggttcattcaaacaatgtggggtcgtttgcctctccctcaggcagaagagtccagagcagagggggttgtctccagtgggtgtctataattgttcctctgtggtcttgcatgtcagaaattgctatttagtggtcagcttctgatgtcctgtctcctagcacagggaagcccccagctttgagatcaggatagtcaaagtgtcttgatacgggccacttgggcttctccccctgacccccccaaaagaaacctgcatcttctctggagaaggtgtttttcttattcttttttttttctttttttcttttttcttttttttaaggatttcttttatcaaagcagtattgctgaagagttggaaacagttctcattgtctcctccttaaaaaaagggctggctttacatgagaagtaagggtggaatggaagaggagaggaacctgtggaaggtgggcgatgagctcaggtctgtagagcctctcagggcctatgaccttgagatgttcatccccttagaagatagaactgggtttcctgggcccccagatgcatttgcagtgagacttgtgaaatgctggacttacaggtggtgtttgatttgatttctgcacattctctctggagtagaaatggagactggaaaggtcgagtctggttttgctgggcagctgggtggccagcaaagccagctgcacgtccccaagcacagatagagtggcaagggcatgtccagcttactgaccatctgcattgagctcattctcattttctatatctgacttaaagtttctctcgtttcttttcttctcttcacctttaagcacaaacataaaccatccttgctacagcctagaacagttaagtaaacctttctcactgcccctaactgtgtgtgccatgaagtcgcagtgttgtagtggctctgggcttcagcggtgtttgccacggccatccctgtgatagtgccacctcagtccccacagaccagtcatctccattgcttttctttgcccgtgatgcttgttggagtagatgaatatagtgtgtcttagcgctgtcctttccggctgtagctcccaccagttaattccgaactgggggtgggctgaccttgatgtgaaagaatgttggagcagcatcctgccaaaaagcaactcacgttggctctcctgccagtgtgccctgagtggccccaaggcacctggctggagggaaaatggcaaacttttggctgaactggagaatgtcctaacaaacccccttccagaatggctttagtctctagtgcttgctagcatgggagctttgtcttgaattccttttgatctgccccgtttctctccagccttaggaataaatctagaggctattgtgcaatgatctgtgggctttttagaagtctctaaatttccttgaaattcagtacagcccagcataaactactcaagttcttgatcagcctgctgctttgttcttattaataaaagcagtgtgtagctggctaaggacttgttttattaatgctccacaggagcagagacagacagagagacatagtgagccttgaaccaaacacctgtattccaacattttacacagcggtctgggcaccctgtgcctaggagagccagctacgtgtctacctgagtctgacctgggccaggggctgttatcttgggaaagccagaatgtcattaagaaagggacaaataggcagttgcttgtgtagcaaggcagccaccaggttgctcaaagggggttctgcataaaccaacatattttgttgttgcttccagggcagcagaagaagcctttgtaaatgacattgacgagtcgtccccaggcactgagtgggaacgggtggcccggctgtgtgactttaaccccaagtctagcaagcaggccaaagatgtctcccgcatgcgctcangtcctcatctccctcaagcaggccccgctggtgcactgaagagcaccctgtggaaacactacatctgcaatatcttaatcctactcagtgaagctcttcacagtcattggattaattatgttgagttcttttggaccaaacctttttgtctttagagttgttcattgtttgtgattgcatgtttccttccttcaactgtgttctccctggcattcagagaggagggagaggaggaagaggaaggggagggaagcttgcatgcctgcaggtcgactctagaggatc

SEQ ID NO: 455 - DNA, 1721 bp, Homo sapiens
agacgggctgcaagagggagccggcccgacgcggaccgcttccctgcagtgccccgagtcccgggcccgcgccgccgccgcccggctccgctcgcggcccctctgtctgcaggcgtgccccggcggcggcggagagccgtcctcggccgaggaggctgggaaacgcgagcgcaggcggcagagaggcctcaacgccgtccctttcgccaccgccttttccttgcctcgcgccgctgtgcatttctctccttttcctttgtttttttggcccctcgcgggtgtgggcattgttggttagcaaaagtgcagcctcaagatggctgatggcaacgaggatctgcgggctgacgacttgcctgggccagccttcgagagctatgagtccatggagcttgcctgccccgctgagcgcagcggccacgtagccgtcagcgacgggcgccacatgttcgtctggggcggctacaagagtaatcaagtcagaggattatatgacttttatctgcctagagaagaactatggatctacaacatggagactggaagatggaaaaaaatcaacactgaaggtgatgttcctccttctatgtcaggaagctgtgctgtgtgtgtagacagggtgctgtacttgtttggaggacaccattcaagaggcaataccaataagttctacatgctggattcaaggtctacagacagagtgttacagtgggaaagaattgattgccaaggaattcctccatcatcaaaggacaaacttggtgtctgggtatataaaaacaagttaatattttttggagggtatggatatttgcctgaagataaagtattgggaacttttgaattcgatgaaacatctttttggaattcaagtcatccaagaggatggaatgatcatgtacatattttagatactgaaacatttacctggagccagcctataactactggtaaagcaccttcacctcgtgctgcccatgcctgtgcaactgtcggaaatagaggcttcgtgtttggaggcaggtatcgagatgctagaatgaatgatcttcactatcttaatctggatacatgggagtggaatgaattaattccacaaggcatatgcccagttggtcgatcttggcactcactaacaccagtttcttcagatcatctttttctctttggaggatttaccactgataaacagccactaagtgatgcctggacttactgcatcagtaaaaatgaatggatacaatttaatcatccatataccgaaaaaccaaggttatggcacacagcttgtgccagcgatgaaggagaagtaattgtttttggtggatgtgccaacaacttgcttgtccatcacagagctgcacacagtaatgaaatactaatattttcagttcaaccaaaatctcttgtacggctaagcttagaagcagtcatttgctttaaagaaatgttagccaactcatggaactgccttccaaaacacttacttcacagtgttaatcagaggtttggtagtaacaacacttctggatcttaaggcttcataaataatgcctatgatcaccttgcatggacagcaatcctgtaaacatcacagagtggcatcatttgtataattatatgcattgttgtagtttgcacctgttggttttaatgtgcatgtgaatggcctagagaacctatttttgtgtctaaagtttacaataaatgtatttaacacc

SEQ ID NO: 456 - DNA, 8592 bp, Homo sapiens
  modified_base (64)..(69): a, c, g, or t
  modified_base (72)..(72): a, c, g, or t
  modified_base (123)..(123): a, c, g, or t
  modified_base (132)..(132): a, c, g, or t
  modified_base (134)..(134): a, c, g, or t
  modified_base (425)..(425): a, c, g, or t
  modified_base (1261)..(1261): a, c, g, or t
  modified_base (1355)..(1355): a, c, g, or t
  modified_base (2679)..(2679): a, c, g, or t
  modified_base (3423)..(3423): a, c, g, or t
  modified_base (3587)..(3589): a, c, g, or t
  modified_base (3591)..(3591): a, c, g, or t
  modified_base (3594)..(3594): a, c, g, or t
  modified_base (3608)..(3608): a, c, g, or t
  modified_base (3614)..(3614): a, c, g, or t
  modified_base (3994)..(3994): a, c, g, or t
  modified_base (3996)..(3996): a, c, g, or t
  modified_base (4039)..(4039): a, c, g, or t
  modified_base (4052)..(4052): a, c, g, or t
  modified_base (4056)..(4056): a, c, g, or t
  modified_base (4116)..(4116): a, c, g, or t
  modified_base (4364)..(4364): a, c, g, or t
  modified_base (4372)..(4372): a, c, g, or t
  modified_base (4568)..(4568): a, c, g, or t
  modified_base (4784)..(4784): a, c, g, or t
  modified_base (5101)..(5101): a, c, g, or t
  modified_base (5527)..(5527): a, c, g, or t
  modified_base (5625)..(5625): a, c, g, or t
  modified_base (5766)..(5766): a, c, g, or t
  modified_base (6001)..(6001): a, c, g, or t
  modified_base (6130)..(6130): a, c, g, or t
  modified_base (6261)..(6264): a, c, g, or t
  modified_base (6267)..(6268): a, c, g, or t
  modified_base (6454)..(6454): a, c, g, or t
  modified_base (6456)..(6461): a, c, g, or t
  modified_base (6463)..(6464): a, c, g, or t
  modified_base (6467)..(6467): a, c, g, or t
  modified_base (6475)..(6475): a, c, g, or t
  modified_base (6486)..(6486): a, c, g, or t
  modified_base (6511)..(6511): a, c, g, or t
  modified_base (6563)..(6570): a, c, g, or t
  modified_base (6593)..(6594): a, c, g, or t
  modified_base (6596)..(6600): a, c, g, or t
  modified_base (6628)..(6628): a, c, g, or t
  modified_base (6644)..(6644): a, c, g, or t
  modified_base (6681)..(6682): a, c, g, or t
  modified_base (6763)..(6763): a, c, g, or t
  modified_base (6783)..(6783): a, c, g, or t
  modified_base (6986)..(6986): a, c, g, or t
  modified_base (6988)..(6989): a, c, g, or t
  modified_base (7205)..(7205): a, c, g, or t
  modified_base (7237)..(7237): a, c, g, or t
  modified_base (7712)..(7712): a, c, g, or t
aagcttgcggccgcggcggctggccggactcaggtgtttcggacgctattgcccttcgcgccannnnnncgngtgggcagcagcgggactcagccgggcgccaggttcctgccaggcagcgcngggaagcgngngcggccgagaactccttcctgctacttcgcccagcgccgctgcttcggcttcccagcgaagtgggagaccttcctccctgtttgcagacgtccgtgggagacccttattttttccaccgctaaggttaagagattctggaatagaagcgtcgaaggagatcaagtgaaccttctacaactcctcggatgtcgccagtctccctttcggggcggaagactacgtttgagcatctcactgaggtgcaggaatggaagaacccaccttgcagcttttctgcagtgtggcttgcntgatctacccctaggaatgaagaggaggcttgtaataatccgatgaagtacagatgttgaagaggatatcgcaggacctaaacttgtgatcgtttgggggaggtcacacacgtttctgagtgggaatggatgggcgtgaatgacgtgccctcttaaaaagcacaacaatcctttaagagagagcaaaattgagttttcccattttggccaagattttgaagacagttcaatgtattctacatttgacataagatgagaactttctaaagtattctctccaagagcgtaaacgatgactaccccagccctgctgcccctctctggacgtaggataccacctctgaacctggggccgccttccttcccacatcacagggctaccttgagactttctgagaagtttattcttctccttattcttagtgccttcatcactctgtgttttggggcattctttttccttccagactcttcaaaacacaaacgctttgatttgggtttagaagatgtgttaattccacatgtagatgccggtaaaggggctaaaaaccccggagtcttcctgatccatggacccgatgaacatagacacagggaagaggaagaacgtctgagaaataaaattcgagctgatcatgagaaggccttggaagaagcaaaagaaaaattaagaaagtcaagagaggaaattcgagcagaaattcagacagagaaaaataaggtagtccaagaaatgaagataaaagagaacaagccactgccaccagtccctattcccaaccttgtaggaatacgtggtggagacccagaagataatgacataagagagaaaaggnaaaaaattaaagagatgatgaaacatgcttgggataactataggacatatgggtggggacataatgaactcagacctattgcaaggaaaggacnctcccctaacatatttggaagttcacaaatgggtgctaccatagtagatgctttggataccctttatatcatgggacttcatgatgaattcctagatgggcaaagatggattgaagacaaccttgatttcagtgtgaattcagaggtgtctgtgtttgaagtcaacattcgatttattggaggcctacttgcagcatattacctatcaggagaggagatattcaagattaaagcagtgcaattggctgagaaactccttcctgcctttaacacacctactgggattccttgggcaatggtgaatttgaaaagtggagtagggcgaaactggggctgggcatctgcaggtagcagcattctggctgaatttggtacactacatatggagttcatccacctcagctacttgacaggggacctgacttactacaaaaaggttatgcacattcggaaactacttcagaaaatggatcgtccaaatggtctttatccaaattatttgaaccccagaacagggcgctggggtcagtatcatacatctgtcggtggcctgggagacagtttttatgaatacttactgaaagcatggttgatgtcagataaaacagaccatgaggcaagaaagatgtatgatgatgctattgaggctatagaaaaacatcttattaagaagtctcgtggaggtcttacctttattggagaatggaagaatgggcacttggaaaaaaagatggggcatttggcctgctttgctgggggaatgtttgcactaggagcagatggttccagagcagataaagctggtcattatttagagctaggggcagaaattgcacgtacttgtcatgagtcatatgacagaactgcattaaagctaggtcctgaatcattcaagtttgatggtgcagtggaggctgtggctgtccggcaggctgaaaagtattatatcctccgtccagaagtaattgaaacctattggtacctatggcgattcactcacgatccaagatacaggcagtggggctgggaagcagcactggccattgaaaagtattgccgagttaatggtgggttttctggagtcaaagatgtatattcctctactcctacacatgatgatgtacagcagagcttttttcttgctgaaacattaaaatatttgtatctgctgttctccggtgatgaccttttacctttagaccactgggtgtttaatacagaggctcaccctctgcctgtgttacatttagccaacaccacactttcaggtaatcctgctgttcgatgaaagcagttccagaaggaccattctcacctgtgtttngtttacatggaccactacagaaattagtttgaaggggcggcttttgaaaacctggacctctatgtcaacatgacagggtgaaactattccccctaagactgttcaacttgtagatacatcaactttgaaattattccattttatacctgaccaaaacatgttctgatatgtgtaggacagagacctggatgtgctttgatcgttaatgaggtggtcacatgagaagtgatacctgttactactgtattgtttttagagtcctgaagtctggaggctagacttcctgaaagcaagtcaagaatatagagcaccttgcaggagttcaagatggcctttggaaccaattatgtatttgtttcctcctacagtggagcagcattcaaatcaaatatttacatattgcttatcactttttctccattttaataatggaatgaactaaaataaacaagaacaaaagaatagtataattatatcagtaacaagaagactcaaaaaagaaacaggagtacctatccctatctgaattttcaagttccccattggatgaccagactggcaaccatttcaaatcccagtctatttcattgaaatttcttggttaagtttaattttctctgggggcatgatctcacaaagaatactcaagtctttttcttcttatggaatcatcgaaactgctatttatcataatcaccacttatgagcctgggtttgggattttgtgcatgtagttcagtctantgttggtagcatgacagaaagtggggaaaatgccgcagtttgttgccttgaaacctaagagcaatccttggttttgttgctacattatttttccagaccaacacatctaccaagtaaattttattcactttaatttcataataaagttagtagagtcactcaannnanaantttatttatgtggncttggncaaaaatcactataaggcagctctaaatttgccttgataagctaaataaattacttttataacttactaaagcagaacaaacagtgaaactttctaaaatattctatctggaatagggacaggggatcttttatttataatctcatcagatgagtgagttgttcacagatattttatgtttttttaattttctccaagaatatttatagaattccaaagaatcagaatagtttcaaaataattttcagtgataaaagagtgttgtaattaatcatattacactaaaattgggatacatctaaggaactttatcttactatcagtaggttttgcattgatatttctttttaaataaactactagttctttatattttgacnanaagaacttaaattttatcaggaactgtaagataaatatctagngcttataaatttnctgnccttaaatttatgtgacagtgcaagatacttttgctcttttcatttaatataggcatctnccattgacattaataaaacttagaaacagtataattagtataacatttactctgaatttgaagatttcctgaaacaaagtttgtacaagaagcccaccttggaattctgaaggcttattttcttgtttgataagcttttcttttaaacttaggttttaagttggggaaagacttaattaactaatatagtattttctaaggttgatcatcttataccacgaatcgttaattttgacagttctactganccgtaaangataaccactgcaaattttttcagtataaaatttttcactgcaaaaaaatttcagtagaaaataaggatgcagggccagttacaatagtccttaagagagttaaattatagcacatgttttgacattgtaatatcttttactacttgaacatttaaatttctaaatgagaaaggtatatatattactgtaactgtngaagggaaaagggaaagtatttggttctaaaaaatgttagccttcctcgtaaaagtagcacaagcccacttatgaatcactgagaaaaagtgaaaaacttgagttggcaaagatgcagagcagcagtgcagatggcaatgaactctctgaattctcttttaccttatttagaagaatgcagagtaaagggaccttcttggttctgcaggaacttcntcaagggatgaggagacagaacccctacttccaagtgctctatttgtattacccagatgactgaagcttaagagaaggcagggaagtatacaagcagagccagttctggtacaaacaaagaatttgacagggacaatggaagggtcttcttcaccactccttaccttctatgtgatggaaagactagagcttataaaagtacttccatttttttattctcctgaataccaaaggcaattaaagtcagctacaaatgacttgccagtgtcatgttttatttttgttatagatttttaaattatttccttcaagatcanttcttatcccatataatgcttagcttccaagaatattctttactttcttctgtcttttacagctctttgcattttgtagaccttaatactcaggttaaatattcattgcatttataagatcttctgcaaaaagcccagaaatggtccttttcaggtgcctcttcaaagagctgacaccttaccttgtgcctttggcacaaatgtgcagaatagatacatcagttggtgcataatcgaaaaaaataggaattttgaacactgttcttccttctacatttatttctcttcattttagaatcacactttttatgttaaaccagattattattattattattattcaaccagtattaagttgttaaaaccaagggaatggggccctaaccaaaaagaagtctcaactcagaaaaataagtccccagtcangtggttcttactttcttgtgggttgcacattttgtatctctctaacatcagcgtattcctgactttaagcaggtgtttatatgtaaaataaaacctgngtatcgaagggaaatgcattctttttatggagtattgaccctgatcctctatgatgtcatatagagcaactcagggctatacttgctagattttaaccaagcagtttgaaatattaatcatcatcctctcatcttctccantctccattgccaaagtctttgtcaaaactccaaatttgttgataaaagattgtgtttgccattctcatttataatgcagtttctccttaagcctggagttttttgaatgagtgcatgagtaaatgagagaatgtgtgaacgaacatttatgaagtatctaacatgtgccaagcattgtgcctggcactttcaatcattagaatgttttatgtgattccacagcattttctgtatnagagtagctcacaacattttaaatgtttccaatatgaatcgtgttacaaaattcttaattttatatttcatataaattaaagaggaaaaagaaaaggtttataatatattttaaaacaatgtgttactntataatacaactataattgtagttaataactaaaacctcttgaaaatgtcaaagaaatacttgatttctgatgcaactttgactaaaatatttactttagaaataaaaacgttcttattttgctatatcannnnaanngcataattaaaaagcagtgttttatagaaatgctggttattttatattcaaaaagattttgtcacataattcatgggtaaaacttgcagttgtaaattgtgtctgctctggtatgggccctattaatagtcccatgctgttaaatataaagaaaaatatactaaaatattcaaagttccaaataanannnnnnannaanagtatttngagttattttnctttaggtttccttatactcaaatnggctaggtcctatcttttcctctctctctctctctctctctctctctctctnnnnnnnnatatatatatatatatatatatnnannnnngagatatatgagatatatgagagatcangatctatatatgtatntaaatacaattatacacagataatttttaatactctnngttaacaaacacagttgaaaactggtttcggctgcacaaataagcagaatatttgagtaactatatatgatatggagatantttaatccatttatcctggnctcaagaacactgataaagatgattttctgttactttagctcattcagatcaggatggacatgctctttttgatctataactgttcagccagcttccagataatattttaggctatgagagctatacagtctctcttattactcatttctgctgttgaagtatcgaaaacagatagagatactatgtaaagaatgggcgtagntnngttccaggaaaactttatttacaaaagcagatggagggctggatttggtccatgggtcatagttagtgaccctgatcccaagtttattttgtgttagaccctctaacctttgatctgcgtcttttctgttttgatttacataattcatttttaaatcaaaaagatgtgcgtatatatggttgtgtgtatctgtataacctaaagctataatatttngttgtcttgaaagcagatacactcttcctggnagtctgttcaggtttcaggacgattgactataatgaaagagacagaatagggtaagggaagatgggtatgctatcagccattttctttgccttgtcatttaatgccataatttcagattctctatgtaaaaagaaggtctgtgtattgtcaaaataatatactctccaagttctcctgctcattgacccttgaaccaggattctggattgctagagctgcagaaattcacccacttgggtactcttagagctctacagcaagaatatgatagaatgtctgatctttgtgctgcagaaagcaaacttttgaagaattctaagcaacagaaaatgggttatgtgactcatctgctatttggcagccactattccttttttagactgcagaacggtactgcccctgttacctctagaatagcctgagtctgaggagtgcagagaaaagatatatccaaaaggagaatccctttctctntgcataactctcaatcctttacaagtaagtagcattatttcagaatgtctatatgcatcattttcaactaaagcatacctcatccttaaacttccactatttaacagctaatccatttcaaacttggtttgagcctagcaattgcagaactcataaaattgcttgtgaaattacacaccatattactagcatatacattgcagtgctccaatcatgctaacagataatagatttttctttaagaattttatcaaatatttcactatttggggaaattttagaggaggggaagcctgtattcaggatgatagagggagcagagacttactgtctctcttccacattataaatgaactgcctttccaggtccaacatgctgtcaggttgcttcagctcggtgtgaatgtaagtgtggggatcaaacacacacacctatacacatacatattaatatgcagaggattttaaataattgcaaatgtcttgtggctgttttatttctacaaaattctgtaagatgtataccagaaaacataataaagataagctcagttcttcattgggaaaaaatatttttaaagaaaatttagaagtttttgctgaattaaagtatcttcaattttaattactggatttggaagttgaaatgccatccttcaatatcactggtctcaaattcattgatagaattttttcttaaactaataagtggggtaagtataatctcctaaattggtacccactggctgctcctaaactggtttccagtcatgtcctccagtatgtgatttttataaattaaaggtaatattgtatattaaagttcaaataaagatgttctttaagtgaaaaaaaaaaaaaaaaaaaaaaaaaaaaaaaa

SEQ ID NO: 457 - DNA, 1486 bp, Homo sapiens
ttattccactggagaagccctgggggtggctggagccagcctgctgagaagcgtggtgcagctgggtctgggacttcactagagcttactctggagcacctattttctgtgcacatgggagtgctccactccctagcagagcagagggaagtctctgccaggtacccacgccacaggcctcaggatggctttttgtctgagggcctcattaggcccagactgctgctgctggtaccagtctcctgagacactgcctccctggagcccatgcatgcccagctgttcttactgcttagtagccttgaagcagcacatctccactgtccctggcaggattgtgggaggcttcacaacccctgctttcctgacttcctcttctgcccaacactgggtgccccttcccagtttcccagcaggggcttcatgggccaccgtcagtgggtctgggcctgccagagtcgtcttgctcttcctcttgcttctaggcaaccacacttggcaagttaaatgtcccaagcaccttgtctcccttcccaagaacaaaccatttctgtgcacatccttggaggcgagatgagctccttgcagagggccagagtaagtgcaagtcatggagtgcaggcagaggggtccatggcttccccagcccagggagggtatcagtatcattcattctctctcccctcactggtatgggttcagagcaatgcctagggcccctctctgctcccctgcctagtggggtggtagtggctacctctcagccccaatagtccctgctcctcttagaatcttcaccaagtggcaggccacctctgggcaggaccacctgcgtctggcacccaggaggtgaggcagacaccatggttaggtgatagggtctgaacccagttggggagacagaggggttcagacttgggaagaatctgtcagtgtgcatggagtgaggtgtgtgtgtgtggatggatgtgcacgtgtgcatgcttttttttctttttgccgtgaggacagttgaatttggggcatttttctacaagaagcagtcagccttctctcccccataaggactggctgtaaccttaagcccatcaaagttacttccagcctggagagaacctcaccaaacagctggtgtggcctgagggtggccatggtgggaaatgggcatgagaataaatacctccccaaattcaatctgagcccagcaggagaggatggtagggttgccagggctcagaagtgcaagctgattactcaccccaccctgcctcgccgcacctttcctttgtttccttgggtgaatgcaggagcagcagtggctgcccttcccacctggacagtggtgtgtgtagaaagccagctggatgtttgtggtggggcctcatggtgcctaggaggagataaagatgaggaggtttttccttattgtataaatgaatatttgtatgattaaattaacacacacaccaaaaaaaaaaaaaaaaaa

SEQ ID NO: 458 - DNA, 1766 bp, Homo sapiens
ggcaaatccggcccaggatgtagagctggcagtgcctgacggcgcgtctgacgcggagttgggtggggtagagagtagggggcggtagtcgggggtggtgggagaaggaggaggcggcgaatcacttataaatggcgccgaagcaggacccgaagcctaaattccaggagggtgagcgagtgctgtgctttcatgggcctcttctttatgaagcaaagtgtgtaaaggttgccataaaggacaaacaagtgaaatacttcatacattacagtggttggaataaaaattgggatgaatgggttccggagagcagagtactcaaatacgtggacaccaatttgcagaaacagcgagaacttcaaaaagccaatcaggagcagtatgcagaggggaagatgagaggggctgccccaggaaagaagacatctggtctgcaacagaaaaatgttgaagtgaaaacgaaaaagaacaaacagaaaacacctggaaatggagatggtggcagtaccagtgagacccctcagcctcctcggaagaaaagggcccgggtagatcctactgttgaaaatgaggaaacattcatgaacagagttgaagttaaagtaaagattcctgaagagctaaaaccgtggcttgttgatgactgggacttaattaccaggcaaaaacagctcttttatcttcctgccaagaagaatgtggattccattcttgaggattatgcaaattacaagaaatctcgtggaaacacagataataaggagtatgcggttaatgaagttgtggcagggataaaagaatacttcaacgtaatgttgggtacccagctactctataaatttgagagaccacagtatgctgaaattcttgcagatcatcccgatgcacccatgtcccaggtgtatggagcgccacatctcctgagattatttgtacgaattggagcaatgttggcttatacacctctggatgagaagagccttgctttattactcaattatcttcacgatttcctaaagtacctggcaaagaattctgcaactttgttcagtgccagcgattatgaagtggctcctcctgagtaccatcggaaagctgtgtgagaggcactctcactcacttatgtttggatctccgtaaacacatttttgttcttagtctatctcttgtacaaacgatgtgctttgaagatgttagtgtataacaattgatgtttgttttctgtttgattttaaacagagaaaaaataaaagggggtaatagctccttttttcttctttctttttttttttcatttcaaaattgctgccagtgttttcaatgatggacaacagagggatatgctgtagagtgttttattgcctagttgacaaagctgcttttgaatgctggtggttctattcctttgacactacgcacttttataatacatgttaatgctatatgacaaaatgctctgattcctagtgccaaaggttcaattcagtgtatataactgaacacactcatccatttgtgcttttgtttttttttatggtgcttaaagtaaagagcccatcctttgcaagtcatccatgttgttacttaggcattttatcttggctcaaattgttgaagaatggtggcttgtttcatggtttttgtatttgtgtctaatgcacgttttaacatgatagacgcaatgcattgtgtagctagttttctggaaaagtcaatcttttaggaattgtttttcagatcttcaataaattttttctttaaatttc

SEQ ID NO: 459 - DNA, 1348 bp, Homo sapiens
caggtggcgtacttggcttggagactggcgcggcgttcgtgtccgagttctctgcaggtcactagtttcccggtagttcagctgcacatgaatagaacagcaatgagagccagtcagaaggactttgaaaattcaatgaatcaagtgaaactcttgaaaaaggatccaggaaacgaagtgaagctaaaactctacgcgctatataagcaggccactgaaggaccttgtaacatgcccaaaccaggtgtatttgacttgatcaacaaggccaaatgggacgcatggaatgcccttggcagcctgcccaaggaagctgccaggcagaactatgtggatttggtgtccagtttgagtccttcattggaatcctctagtcaggtggagcctggaacagacaggaaatcaactgggtttgaaactctggtggtgacctccgaagatggcatcacaaagatcatgttcaaccggcccaaaaagaaaaatgccataaacactgagatgtatcatgaaattatgcgtgcacttaaagctgccagcaaggatgactcaatcatcactgttttaacaggaaatggtgactattacagtagtgggaatgatctgactaacttcactgatattccccctggtggagtagaggagaaagctaaaaataatgccgttttactgagggaatttgtgggctgttttatagattttcctaagcctctgattgcagtggtcaatggtccagctgtgggcatctccgtcaccctccttgggctattcgatgccgtgtatgcatctgacagggcaacatttcatacaccatttagtcacctaggccaaagtccggaaggatgctcctcttacacttttccgaagataatgagcccagccaaggcaacagagatgcttatttttggaaagaagttaacagcgggagaggcatgtgctcaaggacttgttactgaagttttccctgatagcacttttcagaaagaagtctggaccaggctgaaggcatttgcaaagcttcccccaaatgccttgagaatttcaaaagaggtaatcaggaaaagagagagagaaaaactacacgctgttaatgctgaagaatgcaatgtccttcagggaagatggctatcagatgaatgcacaaatgctgtggtgaacttcttatccagaaaatcaaaactgtgatgaccactacagcagagtaaagcatgtccaaggaaggatgtgctgttacctctgatttccagtactggaactaaataagcttcattgtgccttttgtagtgctagaatatcaattacaatgatgatatttcactacagctctgatgaataaaaagttttgtaaaac

SEQ ID NO: 460 - DNA, 3043 bp, Homo sapiens
ttttgaaaacacgctccgggagctagagcctgaggtcggcggcgcacgctgttgccccgtgggcttctgctccctcgcttgtcttctcgggcttctcgccccggccgcggccgggtcctcagtagtcgagaatgactaaaaaaagaaaacgccaacatgattttcaaaaagtgaaattgaaagttggtaaaaagaagcccaagttacaaaatgctactcctacaaactttaaaacaaagactatacatctgcctgagcaactcaaagaggatggaacacttccaacaaacaatagaaaacttaacataaaggatttgctgtcacagatgcatcactacaatgctggggttaaacaaagtgctcttcttggacttaaagaccttttgtctcaatacccatttataattgatgcacacctttcaaacatattaagtgaagtgactgctgtgtttacagataaagatgctaatgtacgattagcagcagttcaacttcttcaattcctggcccccaaaatacgagctgaacaaatttctccattttttcctttggtaagtgcccatctctctagtgccatgactcacattactgaaggaattcaggaggactctttaaaagttttggacattctgctggaacagtacccagctctaattactggccgtagcagcatattgcttaagaattttgtagaacttatttctcatcagcagctgtccaaaggactgataaatagagacagatcccagtcctggatactttctgtaaatcctaatcggagactcacttctcagcaatggaggctgaaagtcttagtgagactcagtaaattccttcaggccttggcagatggatccagtaggttgagagaaagtgaaggacttcaggaacagaaagaaaatccccatgccactagcaactccatttttatcaactggaaggaacatgccaacgaccagcaacacatccaggtttatgaaaatgggggttcacagccaaatgtcagttcacagttcaggctacggtatctggttggaggactgagtggtgtggatgaaggcctgtcatctactgaaaacctgaaaggatttattgagataataattccattgctaattgaatgctgggttgaagctgtacctccacaactagctactcctgttgggaatggtatagaacgagaacctctacaggttatgcagcaagttcttaatattatttcccttctgtggaaactctctaaacaacaggatgaaacccataaattggagtcatggcttcgaaagaactaccttattgattttaaacaccattttatgagtcgttttccatatgtcttaaaagaaataaccaagcacaaaaggaaagagccaaataaaagcatcaagcattgcacagttctctccaataacatagatcgtctcttactgaatttaacactgtctgatatcatggtctccctggcaaatgcgtcaaccttgcagaaggattgcagttggatagaaatgataaggaaatttgtaacagagacccttgaagatggctctaggctaaatagtaagcaactgaacagattgctgggagtatcctggaggttaatgcaaatacagccaaacagagaggacacagagactcttattaaggcagtttatacattatatcagcagaggggccttatccttccagttcggactttgttattgaagtttttcagtaaaatctatcagacagaagaactgagatcttgtagattcagatatcgtagtaaagtgttatcccgttggctggctggcttaccattgcaacttgctcatcttggctcccgaaatcctgagctctctacacagcttatcgatatcattcataccgctgcagcacgagcaaataaagaattactaaaaagtttacaagctactgccctccgaatttatgatccacaagaaggtgctgtggtggttctccctgcagactctcagcagcgtttggttcagcttgtatatttcctacccagtctgccggctgatttgctttctcggttaagtcgttgctgtattatgggaagactcagttcaagtttggctgccatgcttatcgggatactgcacatgagatcatcattttctgggtggaagtattcagctaaagactggttgatgagtgatgtagactatttcagcttcttattttccacacttacagggttttcgaaagaggagttgacttggcttcagagccttcgaggagttcctcatgtcatccagacacagctttcccctgtgcttctctaccttacagatttggatcaatttttacaccactgggatgtaacagaggcagtttttcacagtttattggttattcctgcccgaagtcagaactttgacatcttgcaaagtgccatcagtaagcatttggttgggttgactgtaattcctgacagcacggctggctgtgtttttggtgttatctgtaagctcctggatcatacttgtgtagttagtgagactctactgccatttctggcttcttgttgctacagtcttctttattttctgctcactatagagaaaggggaagcagaacatctaagaaagagggacaagctgtggggggtctgtgtctccatcctggctctcttgcctcgagtcctcaggttgatgctgcagagcctgcgggtgaacagagttgggcctgaggagctgcctgttgtgggccagctgcttcgactgctgcttcagcatgcacccctcaggactcatatgttgaccaatgcgatcttggtgcagcagatcatcaagaatatcacgacattgaagagtggaagtgttcaggaacagtggctcacagacttacattactgctttaacgtgtatatcactgggcatccccaagggcccagtgcactggctacagtgtattgaagaggccatagtacctcctgtttgaagttgtttattcacatctatcttatttgaagaaaaagactgatgtaatagatctttgtcattaaagctgaacttttaaaaaaaaaaaaaaaaaaaaa

SEQ ID NO: 461 - DNA, 2251 bp, Homo sapiens
gacgtcacggtcactgacagcgtgagcccgcggcggctgctgccatggtggctggcggccgggtaagggtctgagtggatctcctgccaggccagagcgccttcgggggccgcggcggaaggccaggagtttgcagccagggcgccgggtttgtggtctgcagtgtcgtgaggctgaggtgcagcatgtctagactgggagccctgggtggtgcccgtgccgggctgggactgttgctgggtaccgccgccggccttggattcctgtgcctcctttacagccagcgatggaaacggacccagcgtcatggccgcagccagagcctgcccaactccctggactatacgcagacttcagatcccggacgccacgtgatgctcctgcgggctgtcccaggtggggctggagatgcctcagtgctgcccagccttccacgggaaggacaggagaaggtgctggaccgcctggactttgtgctgaccagccttgtggcgctgcggcgggaggtggaggagctgagaagcagcctgcgagggcttgcgggggagattgttggggaggtccgatgccacatggaagagaaccagagagtggctcggcggcgaaggtttccgtttgtccgggagaggagtgactccactggctccagctctgtctacttcacggcctcctcgggagccacgttcacagatgctgagagtgaagggggttacacaacagccaatgcggagtctgacaatgagcgggactctgacaaagaaagtgaggacggggaagatgaagtgagctgtgagactgtgaagatggggagaaaggattctcttgacttggaggaagaggcagcttcaggtgcctccagtgccctggaggctggaggttcctcaggcttggaggatgtgctgcccctcctgcagcaggccgacgagctgcacaggggtgatgagcaaggcaagcgggagggcttccagctgctgctcaacaacaagctggtgtatggaagccggcaggactttctctggcgcctggcccgagcctacagtgacatgtgtgagctcactgaggaggtgagcgagaagaagtcatatgccctagatggaaaagaagaagcagaggctgctctggagaagggggatgagagtgctgactgtcacctgtggtatgcggtgctttgtggtcagctggctgagcatgagagcatccagaggcgcatccagagtggctttagcttcaaggagcatgtggacaaagccattgctctccagccagaaaaccccatggctcactttcttcttggcaggtggtgctatcaggtctctcacctgagctggctagaaaaaaaaactgctacagccttgcttgaaagccctctcagtgccactgtggaagatgccctccagagcttcctaaaggctgaagaactacagccaggattttccaaagcaggaagggtatatatttccaagtgctacagagaactagggaaaaactctgaagctagatggtggatgaagttggccctggagctgccagatgtcacgaaggaggatttggctatccagaaggacctggaagaactggaagtcattttacgagactaaccacgtttcactggccttcatgacttgatgccactatttaaggtgggggggcggggaggcttttttccttagaccttgctgagatcaggaaaccacacaaatctgtctcctgggtctgactgctacccactaccactccccattagttaatttattctaacctctaacctaatctagaattggggcagtactcatggcttccgtttctgttgttctctcccttgagtaatctcttaaaaaaatcaagattcacacctgccccaggattacacatgggtagagcctgcaagacctgagaccttccaattgctggtgaggtggatgaacttcaaagctataggaacaaagcacataacttgtcactttaatctttttcactgactaataggactcagtacatatagtcttaagatcataccttacctaccaaggtaaaaagagggatcagagtggcccacagacattgctttcttatcacctatcatgtgaattctacctgtattccagggctggaccacttgataacttccagtgtcctggcagcttttggaatgacagcagtggtatggggtttatgatgctataaaacaatgtctgaaaagttgcctagaatatattttgttacaaacttgaaataaaccaaatttgatgtt

SEQ ID NO: 462 - DNA, 1575 bp, Homo sapiens
agcttttattttctcctctccagtggggttggcttttattgtttcttgtttgggtttggaatggaaatatggatagcagcataaagtacttttattttgacaaaattcatttttttcaacaatggagacatagatttgacccacaataacttctccccctctctttttactctgctcaaaaagcatctctcctcccattacccaaccttggtcataagtgtgcctggctggtttgcagatatttgttctgctttgtaaaaattggccattagtgcatttattgagatgatctctaaagagctatgccctgacctacccctgattctatgacattggggcccttcttttgctgaaactgccttacgtaatggttttactccttgaaagagatttgacggaatccattttatgccaagtgctgccctgcactgtttctgcaatatgtggtgtatgctgtggtgatcttgctgggaatgattataagtgtgtgtgtgatgggggagtgggtattacatgcattgctgaagagtcatcctggtgttcctcattcctcccaccttcccgtggtcattttaattacggggcagtgtcaccgcaaagggaggaaactcaaagccgaaagcaaaattccaggcctgattctggcttttgaggttcctggttcttgaagccaggcctgacccgactctcagatggggtcagtcccgtcgctttgcagactgaccctggaaatctacaaaatgcagattttcctgatttcctcttctcttgcccagtttttttttttttttttttttttttttttaaagcctggattgtaaccagattttcttttttcccccttctcagctgtagatatgatatctcctttcagggccccagcttaagggcaaagtgagttaatgtgtagacaaaggcgagggacaagagagagttaacatctagacagtggaaaaagccatggtgtgtggtttctgggaaccaccaacacttgcaggtttagctttttcccagggttgactacaagaaagaaaaccatgtttttgcaagattaaaatgtggttgagtgtgcctaaattaaccatccccatttttatcatatttccaccatcacttcagggttttaagagtcagtgctcacctgggcggagctggtagtacattttgcttcttagaaagctaagtcctgggttccgtctgattttaggttccaggaacttcctgagaacacccgatcgcagagggtaattttctggagtttgttttgcagggatagctgggagtatggccaccctgctccacgatgcggtaatgaatccagcagaagtggtgaagcagcgcttgcagatgtacaactcgcagcaccggtcagcaatcagctgcatccggacggtgtggaggaccgaggggttgggggccttctaccggagctacaccacgcagctgaccatgaacatccccttccagtccatccacttcatcacctatgagttcctgcaggagcaggtcaacccccaccggacctacaacccgcagtcccacatcatctcaggcgggctggccggggccctcgcc

SEQ ID NO: 463 - DNA, 1947 bp, Homo sapiens
aggttggtctggaccggaagcgaagatggcgacttctggcgcggcctcggcggagctggtgatcggctggtgcatattcggcctcttactactggctattttggcattctgctggatatatgttcgtaaataccaaagtcggcgggaaagtgaagttgtctccaccataacagcaattttttctctagcaattgcacttatcacatcagcacttctaccagtggatatatttttggtttcttacatgaaaaatcaaaatggtacatttaaggactgggctaatgctaatgtcagcagacagattgaggacactgtattatacggttactatactttatattctgttatattgttctgtgtgttcttctggatcccttttgtctacttctattatgaagaaaaggatgatgatgatactagtaaatgtactcaaattaaaacggcactcaagtatactttgggatttgttgtgatttgtgcactgcttcttttagttggtgcctttgttccattgaatgttcccaataacaaaaattctacagagtgggaaaaagtgaagtccctatttgaagaacttggaagtagtcatggtttagctgcattgtcattttctatcagttctctgaccttgattggaatgttggcagctataacttacacagcctatggcatgtctgcgttacctttaaatctgataaaaggcactagaagcgctgcttatgaacgtttggaaaacactgaagacattgaagaagtagaacaacacattcaaacgattaaatcaaaaagcaaagatggtcgacctttgccagcaagggataaacgcgccttaaaacaatttgaagaaaggttacgaacacttaagaagagagagaggcatttagaattcattgaaaacagctggtggacaaaattttgtggcgctctgcgtcccctgaagatcgtctggggaatatttttcatcttagttgcattgctgtttgtaatttctctcttcttgtcaaatttagataaagctcttcattcagctggaatagattctggtttcataatttttggagctaacctgagtaatccactgaatatgcttttgcctttactacaaacagttttccctcttgattatattcttataacaattattattatgtactttatttttacttcaatggcaggaattcgaaatattggcatatggttcttttggattagattatataaaatcagaagaggtagaaccaggccccaagcactcctttttctctgcatgatacttctgcttattgtccttcacactagctacatgatttatagtcttgctccccaatatgttatgtatggaagccaaaattacttaatagagactaatataacttctgataatcataaaggcaattcaaccctttctgtgccaaagagatgtgatgcagatgctcctgaagatcagtgtactgttacccggacatacctattccttcacaagttctggttcttcagtgctgcttactattttggtaactgggcctttcttggggtatttttgattggattaattgtatcctgttgtaaagggaagaaatcggttattgaaggagtagatgaagattcagacataagtgatgatgagccctctgtctattctgcttgacagccttctgtcttaaaggttttataatgctgactgaatatctgttatgcatttttaaagtattaaactaacattaggatttgctaactagctttcatcaaaaatgggagcatggctataagacaactatattttattatatgttttctgaagtaacattgtatcatagattaacattttaaattaccataatcatgctatgtaaatataagactactggctttgtgagggagtgtttgtgcaaaattttttcctctaatgtataatagtgttaaattgattaaaaatcttccagaatt

SEQ ID NO: 464 - DNA, 1335 bp, Homo sapiens
tgattcggtcccgctgtcctaggcgggatggtgccgctgtgccaggttgaagtattgtattttgcaaaaagtgctgaaataacaggagttcgttcagagaccatttctgtgcctcaagaaataaaagcgttgcagctgtggaaggagatagaaactcgacatcctggattggctgatgttagaaatcagataatatttgctgttcgtcaagaatatgtcgagcttggagatcagctcctcgtgcttcagcctggagacgaaattgccgttatcccccccattagtggaggatagtgcttttgagccatctaggaaagatatggatgaagttgaagagaaatctaaagatgttataaactttactgccgagaaactttcagtagatgaagtctcacagttggtgatttctccgctctgtggtgcaatatccctatttgtagggactacaagaaataactttgaagggaaaaaagtcattagcttagaatatgaagcatatctacccatggcggaaaatgaagtcagaaagatttgtagtgacattaggcagaaatggccagtcaaacacatagcagtgttccatagacttggcttggttccagtgtcagaagcaagcataatcattgctgtgtcctcagcccacagagctgcatctcttgaagctgtgagctatgccattgatactttaaaagccaaggtgcccatatggaaaaaggaaatatacgaagagtcatcaacttggaaaggaaacaaagagtgcttttgggcatccaacagttaatcacttatgtttttagagcatgcaatcttaactttgttaaactattattattgatcacattttgatttttttctctccacatcaggatagtttactgaagcacaatctcttatactagtgggacaaaagggagaaaaaggaagcaagataaatgggtatgtaggatgaagggttatttaaaatggaactaaagatagaaggaggactgtaggaagaaatggaataatttaaatgtgaggaaagatatctgtggtagacatgtccttccatgactaatttctaattgtaactcaacacacattgaggtatgggccctcctcagtgactttaactagctcagaaacgtactcccccaccaaccccacctcaccgccccctatcccggttctgggagagcattgttattaaggatgcatgacaggaatgttggcagaactggaaagtattaaaaaagcattatcagacagtcttgatattatacattttcagaaatatattaaaaataataaactaaaacccatgatttcaaaagttaaaaaaaaaaaaaaaaaaaa

SEQ ID NO: 465 - DNA, 2489 bp, Homo sapiens
attaccaggcacgcgcaggaaacatggcggcggcgggtgttgtgagcgggaagattatatatgaacaagaaggagtatatattcactcatcttgtggaaagaccaatgaccaagacggcttgatttcaggaatattacgtgttttagaaaaggatgccgaagtaatagtggactggggaccattggatgatgcattagattcctctagtattctctatgctagaaaggactccagttcagttgtagaatggactcaggccccaaaagaaagaggtcatcgaggatcagaacatctgaacagttacgaagcagaatgggacatggttaatacagtttcatttaaaaggaaaccacataccaatggagatgctccaagtcatagaaatgggaaaagcaaatggtcattcctgttcagtttgacagacctgaaatcaatcaagcaaaacaaagagggtatgggctggtcctatttggtattctgtctaaaggatgacgtcgttctccctgctctacactttcatcaaggagatagcaaactactgattgaatctcttgaaaaatatgtggtattgtgtgaatctccacaggataaaagaacacttcttgtgaattgtcagaataagagtctttcacagtcttttgaaaatcttcttgatgagccagcatatggtttaatacaaaaaattaaaaaggacccttatacggcaactatgataggattttccaaagtcacaaactacatttttgacagtttgagaggcagcgatccctctacacatcaacgaccaccttcagaaatggcagattttcttagtgatgctattccaggtctaaagataaatcaacaagaagaaccaggatttgaagtcatcacaagaattgatttgggggaacgccctgttgttcaaaggagagaaccggtatcactggaagaatggactaagaacattgattctgaaggaagaattttaaatgtagataatatgaagcagatgatatttagagggggacttagtcatgcattgagaaagcaagcatggaaatttcttctgggttattttccctgggacagtaccaaggaggaaagaacccaattacaaaagcaaaaaactgatgaatacttcagaatgaaactgcagtggaaatccatcagccaggaacaagagaaaagaaattcgaggttaagagattatagaagtcttatcgaaaaagatgttaacagaacagatcgaacaaacaagttttatgaaggccaagataatccagggttgattttacttcatgacattttgatgacctactgtatgtatgattttgatttaggatatgttcagggaatgagtgatttactttcccctcttttatatgtgatggaaaatgaagtggatgccttttggtgctttgcctcttacatggaccaaatgcatcagaattttgaagaacaaatgcaaggcatgaagacccagctaattcagctgagtaccttacttcgattgttagacagtggattttgcagttacttagaatctcaggactctggatacctttatttttgcttcaggtggcttttaatcagattcaaaagggaatttagttttctagatattcttcgattatgggaggtaatgtggaccgaactaccatgtacaaatttccatcttcttctctgttgtgctattctggaatcagaaaagcagcaaataatggaaaagcattatggcttcaatgaaatacttaagcatatcaatgaattgtccatgaaaattgatgtggaagatatactctgcaaggcagaagcaatttctctacagatggtaaaatgcaaggaattgccacaagcagtctgtgagatccttgggcttcaaggcggtgaagttacaacaccagattcagacgttggtgaagacgaaaatgttgtcatgactccttgtcctacatctgcatttcaaagtaatgccttgcctacactctctgccagtggagccagaaatgacagcccaacacagataccagtgtcctcagatgtctgcagattaacacctgcatgatcactgttcttgcttttttgggaagagacactttgttgcaaccctttttcaagtacttgaaagttgaaaatttgaaatcttggtattgatcatgctttaaggtttatgtaaagaaagtgtactgatgttcttacattaaagctttacaaagatttaaactaattatttttgtagttacttctaccaaatagcctttccttttcgataacattcctcagtatttttatagccaagtacattttattttcttgctgatgaactggaattggataaatattgcaagtggatgagttggaaattatgcactttgaaaaacattcactttgtttaagcttattgggtttcagatttgattaaattaaatgtggaggctttctatagcattctaagctgagaagtagattgttacccagtaatgaaataaaaaataaaaataaaagg

SEQ ID NO: 466 - DNA, 1538 bp, Homo sapiens
aggccgaggcgggcggatcacctgaggtcgggagttcaagaccagcctgacaaacatggagaaacctcatctctagtaaaaatataaaaattaggcgggcgtggtggcgggcacctgtaatcccagctacttggagacagaattgcttgaacccgagaggcggaggtggcagtgagctgagatcgtgccactacactccagcctgcgcaacagagcgagactccgtctcaaacaaacaaaaaagtcagatctgtgctagacgctgaaaggaattaatcagacaggatctcagtcttttaaagaactttcaaatacagagaagaggtggtaacaaatcattagtgtataatattgcaagcgaaaaaccagaattgtgtgctaagtactggggtaacacagagatggtaattaattctttctggagaaacagcagtgaatgtgacaacctgagtgagggtggaaagcaggagaatttctagactctgaatttcagaagcttccggaactaaaatgatgtggaagttgagtgagtctcggtgggatattgctgctgcacctggtcaaggccgttccgtcagtgttttcagacgccctgggaacgcggctgcagggtccggtcttcggtttgcacagctagaggccgcgcacagcaaaggatgagcggaaccttggaaaaggtgctgtgcctgaggaacaataccatttttaagcaagccttttctctcttaaggtttagaacttcaggagagaagcccatctattctgtaggtggaattctactaagtatcagtcggccctacaagacaaagcccacccacggcattggaaagtacaagcacttaattaaagcagaagagcccaagaagaagaagggaaaagtggaagtgagagccattaatttggggacagattatgaatatggggttttaaatattcatctgactgcatatgatatgaccctggcagagagttatgcccagtatgttcacaacctctgcaactctctctccattaaagtcgaggaaagttatgcaatgccaaccaaaaccatagaagtgttgcagttgcaggaccaaggcagcaaaatgctcctggactcagtgcttaccacccatgagcgagtggttcagatcagcggtttgagtgctacgtttgcagaaattttcttggaaataatccaaagcagtcttcctgaaggagtcagactgtcagtgaaggagcacactgaagaagacttcaagggacgattcaaagctcgaccagaactggaagaactgttggccaagttgaagtagctactgtagaccctttcatgccagcagtggtcatattgagtgccaaagagaagagcttactgggtagttagagttcatcaggagacccaacccttagatttcataagtacccattcccatagccagtaatgtcctcactcctctgtggcttggctgtacttgccatttcttaccacttacctatgaggtaatgcttgttatcttccatctaataaaaatctgctgcagatgtgtatatgtaaa

SEQ ID NO: 467 - DNA, 658 bp, Homo sapiens
  modified_base (12)..(12): a, c, g, or t
  modified_base (18)..(18): a, c, g, or t
ggagcctcacgngagcgnggtaacgttatagtatttgtcagaagttggggtctccgtgggcattgtgatccgtcccaggcagtggattaggaggccagaaggagatcccttccacggtgctaggctgagatggatcctctcagggcccaacagctggctgcggagctggaggtggagatgatggccgatatgtacaacagaatgaccagtgcctgccaccggaagtgtgtgcctcctcactacaaggaagcagagctctccaagggcgagtctgtgtgcctggaccgatgtgtctctaagtacctggacatccatgagcggatgggcaaaaagttgacagagttgtctatgcaggatgaagagctgatgaagagggtgcagcagagctctgggcctgcatgaggtccctgtcagtatacaccctggggtgtaccccaccccttcccactttaataaacgtgctccctgttgggtgtcatctgtgaagactgccaggcctaggctctctgtagagagtcttcaagatcccggagtggtagcgctgtctcctggtgaaggagtatttgtcacactggaatgtgactgtgtgtgtatgtatgtgtatatatatatatatatatatatataaacaagtttgttgacacctacaaaaaaaaaa

SEQ ID NO: 468 - DNA, 1154 bp, Homo sapiens
gcagccaaagccccaggagccctaggttccaaccaactgatgcccctgtgcccactggcccacgccatgcagccccagtccgttctgcacagcggctacttccacccactacttcgggcctggcagacagccaccaccaccctcaatgcctccaacctcatctaccccatctttgtcacggatgttcctgatgacatacagcctatcaccagcctcccaggagtggccaggtatggtgtgaagcggctggaagagatgctgaggcccttggtggaagagggcctacgctgtgtcttgatctttggcgtccccagcagagttcccaaggacgagcggggttccgcagctgactccgaggagtccccagctattgaggcaatccatctgttgaggaagaccttccccaacctcctggtggcctgtgatgtctgcctgtgtccctacacctcccatggtcactgcgggctcctgagtgaaaacggagcattccgggctgaggagagccgccagcggctggctgaggtggcattggcgtatgccaaggcaggatgtcaggtggtagccccgtcggacatgatggatggacgcgtggaagccatcaaagaggccctgatggcacatggacttggcaacagggtatcggtgatgagctacagtgccaaatttgcttcctgtttctatggccctttccgggatgcagctaagtcaagcccagcttttggggaccgccgctgctaccagctgccccctggagcacgaggcctggctctccgagctgtggaccgggatgtacgggaaggagctgacatgctcatggtgaagccgggaatgccctacctggacatcgtgcgggaggtaaaggacaagcaccctgacctccctctcgccgtgtaccacgtctctggagagtttgccatgctgtggcatggagcccaggccggggcatttgatctcaaggctgccgtactggaggccatgactgccttccgcagagcaggtgctgacatcatcatcacctactacacaccgcagctgctgcagtggctgaaggaggaatgatggaggacagtgccaggcccaagaactagaactttcaaacgttcccggggcctcagacaagtgacaaccaaagtaaatgctgcttttagaactgt

SEQ ID NO: 469 - DNA, 2187 bp, Homo sapiens
cagagcagcggagctgccccgaacaaagatggcgcgggaagcgtctgtgagggcagactgatccgagcacccaaaccctcggcggacagcggagccagtggtagccgcacggccctaaaaccatggaggagggcggcagcactggcagtgctggcagtgacagcagcaccagcgggagtggcggggcgcagcaaagggagctggagcgcatggctgaggtcttggtcaccggggaacagctacggctcaggctgcacgaagaaaaggttattaaagatagacgtcatcatctcaagacctacccaaactgttttgtcgcaaaagaactgattgactggctgattgaacacaaagaggcttctgacagagagacggcaattaaactcatgcagaaattagcagaccggggcattattcaccatgtgtgtgatgagcataaggaattcaaggatgtcaaactcttctaccgctttagaaaggatgacggcaccttcccattggataatgaagtgaaggcctttatgagaggacagaggctatatgaaaagctgatgagccctgaaaacacactcctgcagcccagggaggaggaaggggtcaagtatgagcgcaccttcatggcatctgaattcctggactggctggttcaggaaggtgaggccaccacgaggaaagaggcagagcagctttgccaccggcttatggagcatggcatcatccagcatgtgtccagcaagcacccatttgtggacagcaatcttctctaccagttcagaatgaacttccggcggaggcgaagactgatggagctgctcaatgaaaagtccccctcctcccaggaaactcatgacagtcccttctgcctggggaagcagagccatgacaatcggaaatctaccagctttatgtcagtgagccccagcaaggagatcaagatcgtgtctgcagtgaggagaagcagcatgagcagctgtggcagcagcggctacttcagcagcagccccaccctcagcagcagcccccctgtgctctgcaaccccaagtccgtgctgaagagacctgtcacctctgaggaactccttactcccggggctccgtatgcaaggaagacattcacgattgttggtgacgcggttggctggggttttgtggtgcgaggaagtaagccatgccacatccaggctgtagaccccagtggccctgcagccgcagcaggaatgaaggtctgtcagtttgtcgtctctgtcaacgggctcaatgtcctgcatgtagactaccggaccgtgagcaatctgattctgacgggcccacggacgattgtcatggaagtcatggaggagttagagtgctgagctcctgggcctcccagccctccagtggcctgtgggtgagggaagccagaatgacacaaagcaatgcaaagacaagattgccatgcaaatggatggttttggacatacgagtcttctccgcacatacatgtctaaagttgagttttatacactgaatgtggaagaaccgggtatcatatcttttttaaaaaatgtcagtgtagaaaacatttgggaaaccattttcctacatgatagaactgccttactagatttctatttgtagctctcattcattgttttttatcttagtttgcagaaaggtgttgaaatgcttctctagcccaaacagcgacatgctaaagtccccttcttcagagtcaatagagtagttgttaaaggttttaaattgtactttctccaaaattagcatgcagctatttaatagggaatctagatttcaccaagattcaaatcaaagcaacatttaaaggaataagacctgttcactagcattttcaagggggttctaaagcattcaagtgcttaaaagccataaaaaatgacttcttaattcctgcctttagtgtcaacttttaagttaatacaggtttcaattgtggcattaggaaaaaaaaaaaaaccttgtgatgctatggttgggggtagttagggagagactacatgaaattgtgtgcccctattttctttctgatcctaaatcattttgttttataaatcagctatagcatctttctagaattaatcctgaatatgttgaatgttaaaatagagaagtttgtatatacacataattaaaaatcaacccttctggcaaaaaaaaaaaaaaaaaaaa

SEQ ID NO: 470 - DNA, 3345 bp, Homo sapiens
cagatgtccagttccagatgcctggacccagagtgtgggggaaatatctctggagaagccctcactccaaaggctgtccaggcgcaatgtggtggctgcttctctggggagtcctccaggcttgcccaacccggggctccgtcctcttggcccaagagctaccccagcagctgacatcccccgggtacccagagccgtatggcaaaggccaagagagcagcacggacatcaaggctccagagggctttgctgtgaggctcgtcttccaggacttcgacctggagccgtcccaggactgtgcaggggactctgtcacaatctcattcgtcggttcggatccaagccagttctgtggtcagcaaggctcccctctgggcaggccccctggtcagagggagtttgtatcctcagggaggagtttgcggctgaccttccgcacacagccttcctcggagaacaagactgcccaccttcacaagggctttctggccctctaccaaaccgtggctgtgaactatagtcagcccatcagcgaggccagcaggggctctgaggccatcaacgcacctggagacaaccctgccaaggtccagaaccactgccaggagccctattatcaggccgcggcagcaggggcactcacctgtgcaaccccagggacctggaaagacagacaggatggggaggaggttcttcagtgtatgcctgtctgcggacggccagtcacccccattgcccagaatcagacgaccctcggttcttccagagccaagctgggcaacttcccctggcaagccttcaccagtatccacggccgtgggggcggggccctgctgggggacagatggatcctcactgctgcccacaccgtctaccccaaggacagtgtttctctcaggaagaaccagagtgtgaatgtgttcttgggccacacagccatagatgagatgctgaaactggggaaccaccctgtccaccgtgtcgttgtgcaccccgactaccgtcagaatgagtcccataactttagcggggacatcgccctcctggagctgcagcacagcatccccctgggccccaacgtcctcccggtctgtctgcccgataatgagaccctctaccgcagcggcttgttgggctacgtcagtgggtttggcatggagatgggctggctaactactgagctgaagtactcgaggctgcctgtagctcccagggaggcctgcaacgcctggctccaaaagagacagagacccgaggtgttttctgacaatatgttctgtgttggggatgagacgcaaaggcacagtgtctgccagggggacagtggcagcgtctatgtggtatgggacaatcatgcccatcactgggtggccacgggcattgtgtcctggggcatagggtgtggcgaagggtatgacttctacaccaaggtgctcagctatgtggactggatcaagggagtgatgaatggcaagaattgaccctgggggcttgaacagggactgaccagcacagtggaggccccaggcaacagagggcctggagtgaggactgaacactggggtaggggttgggggtggggggttgggggaggcagggaaatcctattcacatcactgttgcaccaagccactgcaagagaaacccccacccggcaagcccgccccatcccagacaggaagcagagtcccacagaccgctcctcctcaccctctacctccctgtgctcatgcactaggccccgggaagcctgtacatctcaacaactttcgccttgaatgtccttagaaccaccttcccctacttcatctgttgacacagcttttatactcacctgtggaagagtcagctactcacccgctattagagtatggaggaaggggttttcattgcattgcatttctgaaacattcctaagaccctttagttgaccttcaaatattcaagctattctgcagctccaagatgcaattatagaaacagctccttttttattttatgtcctctatatgccaggtgcttcacctgttatttcacttaatcctcataccatatttgcaaaggatgtgttattatctatgtgtgacaaatgaggaaactgaggctcaggggataaagggacttgcccaagtcccacagctggtgtgtgactgcagagactgtgctcttcccagtgtgctgcaatacttctcaaccctcctctaacctgctgtgtcacccgctttccctcccagcccccacatccttaccattttccctccctgggaattcctgcttctgcgaaaatggtatcctctagctcacactttcctaatggccccatctcctgcagaagccaggtgagcccagcactggactgaagttcttgcagacaccccacctgtgcccctatcatcaggggaactgctccacctgagaggaccaactctttaatttttagtaaaacctgaaggtgatgggccgggcgcagtggctcacgcctgtaatcccaacaccttaggagtccgaggtgggtggatcacgaggtcaggagatccagcccatcctggccaacatggtgaaaccccatctctactaaaaatacaaaaattagccgggcgtggtgacacgtgcctgtagtcccagctactcgggaggctgaggcaggagaatcacttgaacctgggaggcggaggttgcagtgagctaagatcacgccactgcactccagcctgcggacagaccaagacttcatcccccccaaaaaaaaaagattggaggtgatttacagtgaaagacacaaataaaatacaactgttcaatggaaatagaaaataaacaccataaaagagagaagagaggtaatttgttagcatcaagagtcaagttgctatatggtcaaaggttaaatttatctctaaaaaatggcaggattcaaagttgtacatacatgtgattacttctgttttttacacccacatacagtacaaaagattattaaaaatattcccaaaaggcaggtgcaatgatgcacacttatacccccagccactcaggaggctgatgcaagaggatcgcttgagcccaggagttgaagtccagcctaagcaacatagtgaaaccccatctccaaaaatataataataattctctcaaaatactaaacagaggtggttttattgataagattttggctgtttggttttccactattctctattggctaaaatttgtttaatgagcatgaaatgtttttattttattttgcttatttttatgattgcaaaaaatgatatgagtttctccctgccaaggcaaaaaatatatatatatacctataaaaaaaaaaaaaaaaaaaaaaaaaaa

SEQ ID NO: 471 - DNA, 3472 bp, Homo sapiens
  modified_base (1009)..(1009): a, c, g, or t
  modified_base (1439)..(1439): a, c, g, or t
  modified_base (1493)..(1493): a, c, g, or t
  modified_base (1517)..(1517): a, c, g, or t
  modified_base (1663)..(1663): a, c, g, or t
  modified_base (1777)..(1777): a, c, g, or t
  modified_base (2012)..(2012): a, c, g, or t
  modified_base (2283)..(2283): a, c, g, or t
  modified_base (2935)..(2935): a, c, g, or t
  modified_base (3122)..(3122): a, c, g, or t
  modified_base (3238)..(3238): a, c, g, or t
  modified_base (3356)..(3357): a, c, g, or t
aaatcggtacaagatggcggagggggacgaggcagcgcgagggcagcaaccgcaccaggggctgtggcgccggcgacggaccagcgacccaagcgccgcggttaaccacgtctcgtccacgacctccctaggtgagaattatgaagatgatgacctagtaaattctgatgaggttatgaagaaaccatgtccagtacagattgttcttgctcatgaagatgaccataactttgaacttgatgaagaagctttggagcagatattgctacaggagcacatacgagatcttaacatagtagtggtatctgtggcaggagcttttcgtaaagggaagtcatttctactggacttcatgcttagatacatgtataacaaggattctcaaagttggattggtggaaacaatgaaccattgacaggctttacatggcgaggtggctgtgaaagagaaacaacaggcatacaagtttggaatgaagtatttgtgattgacagacctaatggaactaaagttgctgtgctgcttatggatacccagggtgcctttgatagccagtcaactatcaaagactgtgcaacggtgtttgctctgagcactatgactagctctgtccaggtatataatctgtctcagaatattcaagaagatgatcttcaacatttgcaattatttacagagtatggaagacttgcgatggaagaaatctaccagaaaccatttcagacattaatgtttttgattcgagattggagctatccttatgaacattcatatggtttggaaggtggaaagcaatttcttgaaaagagattacaggtaaaacaaaatcaacatgaagagcttcagaatgtaaggaagcacatacacaattgtttctcaaatcttggttgcttccttttgccacatcctggtcttaaagttgcaactaatcctagttttgatgggagattgaaagatattgatgaagactttaaacgagagcttcgaaatctggttccattgctgctntgcccctgaaaatttggtagaaaaagagataagtggatctaaagtcacttgtagagatcttgtagaatattttaaggcttacatcaaaatctatcaaggagaagaacttccacatccaaagtccatgcttcaggcaacagctgaagctaataatcttgctgcagtagcaggagcaagagatacctattgtaaaagtatggaacaggtatgtggaggggacaagccttacattgcaccttcagatctggagcgaaaacacttggatctcaaggaagtggcgataaaacaatttcgttcagtaaaaaagatgggtggagatgagttctgccgtcgttatcaggaccagcttgaagctgaaattgaagaaacctatgcaaattttataaagcacaatgatggcaaaaatatcttctatgctgctcgtaccccngccacactgtttgcggtcatgtttgctatgtatataatctcaggactgactggncttcattggcctaaactctatagnctgtcttgtgtaaccttgtcatggagttagcactgatatttctttgtacttgggcatatgttaaatactctggggagttcagagaaattggaacagtgattgatcagattgctgaaacactatgggaacaggtgttttccaaactntttgaagttactagacgtcgaatggttcaccgtgctctttcatcagcacagcgacagagactgtcatccaacaataacaagaagaaaaattagacagtatttttaacctttttntctatctgaagtgttcacacttacacatgtaggacaataagcaggaccgtctgggccggtctgcataaatgctgtatacataccagatttgatgctgcatatagggtatggaattgcacatccatctcataggaattgtaaatggtttgaataagaggaaagtaatttttgttgcattataaaatgtctagtagcatcataagtttttttgagagaagcatctttttatttcccntattcctggttattttcatcattgctttgaattgaatttttatatctatttttatatgtaactctttttttacctcatgtttttgtttgttttgcacatttctcataccacaggtattgaagcccctgggtgataatttgatggaggaaaacataaggcagtctgtaacaaactctatcaaagcaggcctgactgaccaggtgtctcatcatgccagattaaagacagactgacagttcatctcctcacggactccactctcttttttttncatgcttgctgtacaatgagaactcaaataaaaataaaccaaagtttacaatcaactgtagaagtagtttagtgtaactggcttcacagatggctgccacagagtgtgaagattgtttgttagttttaagcattcttttaatggctcctaagacatgcagatggactgaggagcattggttaatcatgcacctttgtgccatgtttaactcttttatttctttttacttaatctaatgttagtgaatttgtcttatgtaaaaggatatttcagggaaatattttcagaaatctatttagagtctctttaacacagtgtcccattgaaattttaatttttagagaatttatgaatcactgtttcaagaaccagattggaaagacaatgaagcctttattgagccactacattaaaagtatatattgctttactgccttcaataccagtattacatcaatgcatgtatcagaaacttcacagaaattacatggcaactcttgtagctaagaaagtaattctgaggtgtacatttgtcttgcctttttaaatttataaacttgccctaaaaggagatgcatatctgggaaactgaactgtctttttgcagtttagccttcatgtatataaaatatgccattaattttattggggnaagaaattccatccaaaaatgttgcctacagctatgagttaagagtgtctgtacagtgtgtagcttttattttctaaaatcacagatagggcatgtatatgacttataaatatataaatacgattttgtattaaaagttttgtagtttatggcaaaatctggtcctgtggtaggctaaataagtacngtccctgtgaaaggaatgtttgtggctcatgtcagtgtgtgaatgcatagacaatttgaagtttttgatatatttgtgatatttatcttgagcactgcaatctcaccccccccccncccaccaagggaattcaatgggaatgtttattgtgactttgtcctctgttgcattttaaagttatttcctgtaatttattttcagtacataattaaaaatttgttgtatatataaaannaaaaagggtctgtaaaaaaaaactccaaggggggggcccggtcctaatttcgccctaatagtgagtccgttttacaattcactgggccgtcgttttacaacgtcgggactgggaa

SEQ ID NO: 472 - DNA, 3521 bp, Homo sapiens
ggggggcgtgagagggcacggggaaaaggtggctctggccggggtggctcggtttcctggggctatgtaactgagctcgtcgacttaggggtccttcttcgctgccctcgccgcgtgctagcagggagtttccgctcgggagagagactgtcctcacgcccgctgcgcctcctcgacggcagagcaggcttgctcgcccgtgggagcgtcccggccgagaagccctgaggggggaggggaggccattttgtcccgaccgactccccggaaccgggcggagcggctgggagaggctgcggagccgcggtcgccgccctcggaggcactggacgccgccactgtcggggcttcctcaaagctgttcgtaggtcgcccgcgccgtctcgagccttttacccacgcttccccggtcctccggcctgagaacgcccgagtgaggagttggccgtagtgagagggaccgatcccttggggccgccggcggcgagagcccgagccgctcctcccaatggcgaagaagacgtacgacctgcttttcaagctgctcctgatcggggattccggagtggggaagacctgcgtcctttttcgtttttcggatgatgccttcaatactacctttatttccaccataggaatagacttcaagatcaaaacagttgaattacaaggaaagaagatcaagctacagatatgggatacagcaggccaggagcgatttcacaccatcacaacctcctactacagaggcgcaatgggtatcatgctagtatatgacatcaccaatggtaaaagttttgaaaacatcagcaaatggcttagaaacatagatgagcatgccaatgaagatgtggaaagaatgttactgggaaacaagtgtgatatggacgacaaaagagttgtacctaaaggaaaaggaggacagattgcaagggagcatggtattaggttttttgagactagtgcaaaagcaaatataaacatcgaaaaggcgttcctcacgttagctgaagatatccttcgaaagacccctgtaaaagagcccaacagtgaaaatgtagatatcagcagtggaggaggcgtgacaggctggaagagcaaatgctgctgagcattctcctgttccatcagttgccatccactaccccgttttctcttcttgctgcaaaataaaccactctgtccatttttaactctaaacagatatttttgtttctcatcttaactatccaagccacctattttatttgttctttcatctgtgactgcttgctgactttatcataattttcttcaaacaaaaaaatgtatagaaaaatcatgtctgtgacttcatttttaaatgtacttgctcagctcaactgcatttcagttgtattatagtccagttcttatcaacattaaaacctatagcaatcatttcaaatctattctgcaaattgtataagaataaagttagaattaacaattttattttgtacaacagtggaattttctgtcatggataatgtgcttgagtccctataatctatagacatgtgatagcaaaagaaacaaacaaaagccaggaaaacactcattttcgccttgaatatgtaaatgggattaattttgtcctgtgccttatgtggaaaggaacttctttggttttccttttttgttctggtggaagcatgtgcaggagacatatcatccaaacataaaccattaaaatgtttgtggtttgcttggctgtaattttcaaagtagttaattgaggacaaagggtaatgcagaagtgatagctttggtttgctgagtcttgttttaagtggccttgatatttaaaactattcctgccaccatttcttctccttggccacttcttccttgcgtctccctgcatgctgctttatttgcttctccctccccaaccacctcatggtatatttaagagtgaaagggacaaactagtaggtttgtcaagtttaatataaagcactgatgtaacttgctaggtaaacggaaagataagttctaactgcctactatccaatgtcagttaattggtgtcttcccccctcatttgctctcttccctaaaatgtgtcccagatgccttcatttgctgttttacttctatgttctgcttttcctcctctctttgttcccttcctgtctatccattgagtttatgaaatggaagagttaactgcatgcactagtgtttggagggtgttgtggtttgtctttctaattaggtgtatagcctattcactttcctagaataaatctcttaacctaaatttgagtagtctgcattttggcaactcctctagcagcttggtagcctagtacaggttgttttttaaaaaaaggaaaagcaggaaggaggagtgaattttattaacatgtttgccaaatgtattgagatttggcctctgaagaacactttttcagtgttaagtttctttaccttaagattcagaaatactttagaatattattaattttaagtcctgtctttacatccttttggaaaacttgtattaccatgagtttggaaaaaggacaacgaaaggcttttcatgtaaagataagatctttggctatctctaaccctgtccttttttcactgcattttttctagttttgcttcattgcttatcattaggatagggtaagtgaagtttgctatgctgctagcatcctaagatgatacctttgttgaaagaattgtgaatagcatgattcatttctagcagaggctgagtttaggactgcagcttccattgagaagtctttctgtgtcgtgaatagcattttaatgacctcttggctcacataagcaaacaacatagggacgtatctgctatgaaaatccacaaatttttcagatagtgccctaaaaacaattttatatgcctcactggttgttattcttaggttattcccacacttgactttatcattgtttactactagtaaaaagcagcattgccaaataatccctaattttccactaaaaatataatgaaatgatgttaagctttttgaaaagtttaggttaaacctactgttgttagattaatgtatttgttgcttccctttatctggaatgtggcattagcttttttattttaaccctctttaattcttattcaattccatgacttaaggttggagagctaaacactgggatttttggataacagactgacagttttgcataattataatcggcattgtacatagaaaggatatggctaccttttgttaaatctgcactttctaaatatcaaaaaagggaaatgaagtataaatcaatttttgtataatctgtttgaaacatgagttttatttgcttaatattagggctttgccccttttctgtaagtctcttgggatcctgtgtagaagctgttctcattaaacaccaaacagttaagtccattctctggtactagctacaaattcggtttcatattctacttaacaatttaaataaactgaaatatttccaaaaaaaaaaaaaaaaaaaac

SEQ ID NO: 473 - DNA, 1188 bp, Homo sapiens
cagggctgggcggcggcggcggcggcggtcatggaacgccaagaggagtctctgtccgcgcggccggccctggagaccgaggggctgcgcttcctgcacaccacggtgggctccctgctggccacctatggctggtacatcgtcttcagctgcatccttctctacgtggtctttcagaagctttccgcccggctaagagccttgaggcagaggcagctggaccgagctgcggctgctgtggaacctgatgttgttgttaaacgacaagaagctttagcagctgctcgactgaaaatgcaagaagaactaaatgcgcaagttgaaaagcataaggaaaaactgaaacaacttgaagaagaaaaaaggagacagaagattgaaatgtgggacagcatgcaagaaggaaaaagttacaaaggaaatgcaaagaaaccccaggaggaagacagtcctgggccttccacttcatctgtcctgaaacggaaatcggacagaaagcctttgcggggaggaggttataacccgttgtctggtgaaggaggcggagcttgctcctggagacctggacgcagaggcccgtcatctggcggatgaggctaagaatcttgttagtgtcacttttgacattagcaagatgaacccttaaccctcgattcaattgccttacgcacgcttttcacagtgactagccaaggggaggtggggttgatttctgttcctaactacacctgcatatgtcagggctccagtcagcaaaaggtatagatgttgcctctaggcatgaggtcattggtcacattctacttggagacagtgattgcattcattgatttcatggttaattgctagttggtaggtaaaggcctctagatgattagcaatcttgataaaagaggcctagtaatgttcttttgaggttagaaatccttgctgctaggacagtctctgtgacaggttgcgttgaatgatgtcttccttatcaatggtgagcccaccagtgaggattactgatgtggacagttgatggggtttgtttctgtatatttatttttatgtacagaactttgtaaaaacgaaactatttaaaaaacaagaataacatttttagcatctttattcaaggagatttatggacttcaatttgtctatcaaacattaaatagctttttatttccaaaaaaaaaaaaa

SEQ ID NO: 474 - DNA, 1355 bp, Homo sapiens
  modified_base (1301)..(1301): a, c, g, or t
gggcaggcagttgaggtggattaaaccaaacccagctacgcaaaatcttagcatactcctcaattacccacataggatgaataatagcagttctaccgtacaaccccggaggcgcagaccgtccacacgggacagggacgcccgctcggctccgctccgcgctgatcctcaaggtctcgcggtttccccgccgcccacccggacgccgacgaaagccagcgagctcctcagcctcaggcatctgcatctgggaccgacctcctgggctggctgatcaaagaggaagcagcagcaatgtctgctgtgggggctgcaactccatacctgcatcatcctggtgatagtcacagtggccgagtgagtttcttgggggcccagcttcctccagaggtggcagcaatggcccggctactaggggacctagacaggagcacgttcagaaagttgctgaagtttgtggtcagcagcctgcagggggaggactgccgagaggctgtgcagcgtcttggggtcagcgccaacctgccggaggagcagctgggtgccctgctggcaggcatgcacacactgctccagcaggccctccgtctgccccccaccagcctgaagcctgacaccttcagggaccagctccaggagctctgcatcccccaagacctggtcggggacttggccagcgtggtatttgggagccagcggcccctccttgattctgtggcccagcagcagggggcctggctgccgcatgttgctgactttcggtggcgggtggatgtagcaatctccaccagtgccctggctcgctccctgcagccgagcgtcctgatgcagctgaagctttcagatgggtcagcataccgctttgaggtccccacagccaagttccaggagctgcggtacagcgtggccctggtcctaaaggagatggcagatctggagaagaggtgtgagcgcagactgcaggactgacccctcacttgaccagtcccattcagatccggcttggacaggcacctgagatggtgccaaagtgcagctgactcttcccacgacagccctggccttcccatcaggcaggctcttcagtgagtgtttgaacgtaattatgtagttttctgtttaattgaaaaagagagctatgcctttttttctttttggaagtaaagcagctaaaacatgtttctataggtgagtgttggaccttcacacctccccttccctgtacatttgtctttggtgctggacgtggccatgtgaggccaggttgaggccctttgtagacaacatacagttgctcagcntggccccatgtagccaggtgcttttgtagatcttgtgtttcaggcagggcccgg

SEQ ID NO: 475 - DNA, 1273 bp, Homo sapiens
acgatggctactggggagctcggggacttgggtggctactacttcaggttcttgcctcagaaaaccttccagtctctgagctctaaggagatcaccagccggctccgccagtggtgaggaaccgaggcgcagggagagaagaggcccttggtcttcgcggctgtggaggcgcaggccgggcgtcgaggggcccgcgcgggtcggcgccattctgagtgaaccctgaggcttcctgagtgaaccccgaaccacccgggaagggcggatgctgtgggtgggatcggttatcggtgcgctctgagagggtgccagcccccagatgatttctttttcctcctctgccccaggtccatgctgggcagaatcaaggcgcaggcgttcggctttgaccagacctttcagtcctatcggaaggatgatttcgttatggcttttttcaaagacccaaatgttattcccaatttgaagttactttcagattcttctggacaatggatcatattaggaactgaagtgaaaaaaattgaagctataaatgttccttgcacacagctttcaatgtcattttttcatcggttatatgatgaagatattgtacgagacagtggacatattgttaaatgtttagattctttttgtgatccatttctcatttctgatgagttacgaagagttttgctagtggaagactcagaaaaatatgaaatattcagccaaccagatagagaagagttcctgttttgtcttttcaaacatctttgccttggtggagccctttgtcaatatgaggatgtgattagcccatatctggaaacaacaaagcttatctataaggatctggtgagtgttcgaaagaatcctcaaaccaagaaaatacagattacctcttctgtctttaaagtttcagcttatgattctgctggtatgtgctatccttcagcaaagaatcatgaacagacattttcttactttattgtggatcctatcaggcgtcaccttcatgttttataccactgttatggtgtgggagacatgtcttaatgttctttcagattatgtacctctactattttgtatttatcatttttctatcttaatactaacttatagataaacatatactttgcaaattaattcaagaaaaatgtaaggagcctacttagagcagaagaaagcaaacaccaagatgcctttttaaaaatttgtgtggaatactaaccggggatcaaatttcatccataataaaatctataccaaaaaaaaaaaaaaaaaa

SEQ ID NO: 476 - DNA, 2195 bp, Homo sapiens
  modified_base (134)..(134): a, c, g, or t
  modified_base (1932)..(1932): a, c, g, or t
  modified_base (2068)..(2068): a, c, g, or t
  modified_base (2141)..(2141): a, c, g, or t
tctctttttttttttttttttttttcgttcttttttttgttttttttttttttttttttttttttttttcacattttttttggatttatttaaagaacacacaaaaaagtgcatctaaatgatttttttttttnaaaaaacaatgtctttaattcctcatatgctgacttggcaatccatatgcagcctaaaaggtggttgaaagatgtctgtggacttctacacaaattgtttaagattattgaatttgatacaagaatacgtgaagtgtcttcttgagtggtaatgggcaccctgtagttatttgctcagaaccactcacacacccttcccctccccacacacacttttgccagttccccctggtgaaccataatacacacgtgggagacagctggcatcatctgagtcttggaatagctttcttgtttgttatctgcaaaaagctaggtggcctttttagtatcaaatttcaatcttggcctcactggaaccatgctctacagagctttcccaacagtttagcaagtaagcaaaatcagcttttgctcttcatatttcgtaggtgagactggggcttttaaaagaaatatttcataaaaaagacaaaagcataaatgagaaattagagggattttagttatcattaaaggaaaaaactcacaaattgatcccatttgttccatggggaagaaaagtattataaaaggaaataacttgatttttaggtttgaagggggtcccaatctaataataaaagtcttttgataaaaccatcataaaaataaaaactaatttaaaatataactgccagtgttttttaggatttaaaaaggtgagatgttccaggtttaagcaaatggttccttgggttgccaaatgcattcccatgagtgtttcttaggctgagggaatagagagccatgctcaatctgtttacccgtaaggactgaaattcaactacatgtacacatttaagacttgccctagttcaatggtcagctcaagtactggagatttaggctactggctgtgtaccggcatgggaagctgtcttcaactctttcacaactcacgccagaacagagaagcttgacagggcaggaaaagcgagcaactgcgtgtcaaacctgcaggtgaaacccctagtgtagaagagcaactatttatttgtcaacactacagattttgtttttaaaaattaagcttagtactaaaaagtcaaaatttttttgcatgatagaggagtgtaaataaagttccataaaccagtatacatatgcttatgagccaataatcttaaaaagacaaaaaaagctgcatggatcctaaatgactatgtaaatagatccactccaggtcaaaaatattgtaagcacaagtcttaaattcttaatagcaaggattagaatgaaagaagaagctgagcagtagcaatgctgggaggaagtactgtgtattgaatattattccctaaaaggaatagaggaggggagaaaaagcacaattctgattgctcttttcacatttcagtatctcagaacttcatcgaaaataggaaaagctaatccagaaactctcatctgctcattatcattgctgaagggtgttttaggaatgacagaattactcccccagggacaggctgtgtgtggtagaaagccactctcacaaggaggctggctgaggagggggactttgggaggaggctaagtcagcaagcaagtggcctctgaggttctggctttcacgtctgtgacactgctgtggaactggggagacatgagacccctctactgtgggttctgttggttaaaaatgcaacagactacatttatagcacttcagtcatttaaaaaacaaaagcttatcctccttcccctaccctacccaactgtaggaaaggagaaattcatgaagcatttttttttnaaaggtttctgcagtgctatgaaagttcaaaggtaaaacctaacagccccacattgttaggatgatctccagggaccctgaattggatacttgaaggttgatagaaactgaaatgagctggacttaagctgctggntcactccctccacaccacagtcatttctgtttgttccacctggagtggtcccgtgccacccctcagtgaaccntccgggcagcagcaggggggctgtttttgggaagctactggttttgccatttgc

SEQ ID NO: 477 - DNA, 620 bp, Homo sapiens
  modified_base (40)..(43): a, c, g, or t
  modified_base (45)..(46): a, c, g, or t
  modified_base (48)..(49): a, c, g, or t
  modified_base (51)..(52): a, c, g, or t
  modified_base (54)..(55): a, c, g, or t
  modified_base (57)..(62): a, c, g, or t
  modified_base (64)..(68): a, c, g, or t
  modified_base (70)..(80): a, c, g, or t
  modified_base (91)..(94): a, c, g, or t
  modified_base (353)..(353): a, c, g, or t
  modified_base (609)..(609): a, c, g, or t
  modified_base (611)..(613): a, c, g, or t
  modified_base (615)..(615): a, c, g, or t
agagctgtgacagctggctacactgctggcagttcacacnnnntnntnntnntnntnnnnnncnnnnntnnnnnnnnnnnttttttttttnnnnttcctatttttgtttaatttatttaagaccacctccttacaacttccagagagaaaatacaaaacaagaaacagacttggtttcaaatgcataaccaggtgctggagtttaaagcattactgataacattgttacagaagaatggcagcttactccagggcacttcagtattcctgaggaataaacatgatttctcttgtcctcccgctgggatgttctcaggtgaagtcactgctcctgctctttgacatattttccntgtagaagatatggagcctggaaatcatgctgacagttggaataagccattcctaatcccatgccagaaccgaaggctaatggccacattcttcttttaaagaaggtaagtgagaaaacaattcctaatccaaaaccagtacctatcttcacgaccgcatccgccagacaccggtcccacttcctgccgagctccgactcagacatgttccccacccgcgcctccagctttcctctcggccggcccccgcgctccnannncntgaaa

SEQ ID NO: 478 - DNA, 2619 bp, Homo sapiens
  modified_base (719)..(719): a, c, g, or t
  modified_base (820)..(820): a, c, g, or t
  modified_base (823)..(832): a, c, g, or t
  modified_base (834)..(838): a, c, g, or t
  modified_base (840)..(840): a, c, g, or t
  modified_base (1164)..(1164): a, c, g, or t
  modified_base (1323)..(1323): a, c, g, or t
  modified_base (1883)..(1883): a, c, g, or t
  modified_base (1914)..(1914): a, c, g, or t
  modified_base (1923)..(1923): a, c, g, or t
  modified_base (1947)..(1948): a, c, g, or t
  modified_base (2080)..(2080): a, c, g, or t
  modified_base (2418)..(2418): a, c, g, or t
  modified_base (2513)..(2513): a, c, g, or t
  modified_base (2577)..(2577): a, c, g, or t
  modified_base (2595)..(2596): a, c, g, or t
  modified_base (2606)..(2606): a, c, g, or t
  modified_base (2610)..(2611): a, c, g, or t
  modified_base (2614)..(2616): a, c, g, or t
  modified_base (2618)..(2618): a, c, g, or t
ttttttttttttttttttttttttttacattttaaaaaattatctttatttaggtttctgattcagcacatgtatcaaagactaatcaacataaaggagtaaataagacattaattgaaagtcttacatctctctaaactctgaccaagaatgtcaagattgccactattaccagaactccaacctagtcaagttgtagacaagctatcatgaacaacatacagtgtgcacagatatgcagaggcaaaaggcatgctagcgcttggctctcctcttttccttgttgacatctttctgttggacagtccactttcgctttccaggctaagttccaaatcaagtccaaagaaggctcagggtcaacctgaccagatactcttctggaggaatgcattcttaaactgttgtgcctgcaactttgtttttgccaggatgaagttcagaccgagatgtacaatacaatctagatgacggtgcagactaagtcaagaactaaagttgtgcagtaacccgagttaaggcatgaatgcagacacacacatgcacacacacagcacccatgctatcaagacacaggattttttcagttgcctcatgagaggcaacctgggcttggcagttaatcagaactgctgagcattccagaaaatgccccccacgactttatgctaacagctgtgtgtatgttttaatcaaaaaattaaagaagaaaaaaaaanccctaaaaaacaaagaaaaaaacaaacaaaaaatcaccaaaaacctagaaaccccttaatctcttacaatggctcttgagcatggaactcatgtagcagcntcnnnnnnnnnntnnnnnanaatttggaaataaaaggttgttttactatgtatttctttggtagtcatcactacaaagttttcagtgttggttacctataagacaagtactagacagaagatcaagttacacagaaatatttcttctgtactgataagatacaaatattgagctctcaaagcacaagttactatgctttttcttgccttattgggcattctctaaaagcaaggctttgtgcaggaaaagttcatgtctacctaacaaagggtgatacatgttctattttcctacaagtgaacaattaacaaaaattcacattatcaattatttctggttgaatnctgttagaagccaattacaaagggacagtagcacttggtgtcaaagccactttctggtcacacattcattccatggttgctagtcagtatctcaggagctcagaatttaaaactcctttcagtcaacgaaggagtaagttcaattaaaggcttccactntctgccaaatttctagaattctgtctagagtgctagcatgcttgatgagagaaagcagttcagagcccaaagaggtgtcaggtattaggtaagttaatttggttttgtataaaaggcatggtaatctggcaacagagtacttatcctattagcagcacagtggtagccaagggtctctgtctgcaagacaggaaaatgaagctactgaagcccctgttgctcccacctgcctgcaggatggctactgattttacaaaggccttctgggagccaatccagggctcacctgggagagtgggtaacagaatggcaggaaccatgttcagcccccatgagaagtgcccgactgagggaagtcagcttcccataggtgagggggctgttgccattatgggctcagaatctaaatcttactgatccctagtagtaagacaattgccaagaaattgtcctagcaggtactacccaagtgttacaggctctgcataggtcctcaaacactttaaaggacacgaaccatcaaattcaaaagagtagtgtttgttctatcagttctgaantgtccacagggagaggcaactagatttatgntggaaaaangtgctgtttgaaggagctgtgttnnatttcgaagtgaaatgactttgggaaccagaacatttctgcagatgtctgaatatcaagaacctatctctaaaaggcatttatcaggaaatgttcgctcactccaagtgctttttaaaaattcaacatatgncaatgttttaatttttgtgctttcaagaggtaactaaatcgataggaagctgagggaagatcattccattatggactttcttgtttgggtgcaagacactatccacagcattgaaatctataatctcataaaagattcttataaacatataccatatttctcctataagaaaaactgagaactgtaccatgaaggcaaaatttgtttgcctactctcagaattccttggaatggcaatgtaccaggagggtgagtgaactgttggtgaaaattccgggtttgacatggcccagtctgatcacatcaaaaacctaaagcctcaatgattaaatgccaancttcttccctgcatctgagaactgtattatgattatgtatattacacatacattataaataaaatttatatagacctacagtttcttccaaacanttgagtgatgttctcagtttgggggtggaagcaggaagaggtgaaaaaatcttattgttgcttntactctcaagttcttaanncgctagtcancacnnttnnncnc

SEQ ID NO: 479 - DNA, 4873 bp, Homo sapiens
  modified_base (263)..(269): a, c, g, or t
  modified_base (271)..(274): a, c, g, or t
  modified_base (277)..(284): a, c, g, or t
  modified_base (304)..(304): a, c, g, or t
  modified_base (1857)..(1857): a, c, g, or t
  modified_base (1860)..(1861): a, c, g, or t
  modified_base (1870)..(1871): a, c, g, or t
  modified_base (1884)..(1884): a, c, g, or t
  modified_base (1893)..(1893): a, c, g, or t
  modified_base (1904)..(1904): a, c, g, or t
  modified_base (1915)..(1915): a, c, g, or t
  modified_base (1949)..(1949): a, c, g, or t
  modified_base (1951)..(1952): a, c, g, or t
  modified_base (1954)..(1957): a, c, g, or t
  modified_base (1988)..(1988): a, c, g, or t
  modified_base (2150)..(2150): a, c, g, or t
  modified_base (2162)..(2162): a, c, g, or t
  modified_base (2502)..(2502): a, c, g, or t
  modified_base (2737)..(2737): a, c, g, or t
  modified_base (2932)..(2932): a, c, g, or t
  modified_base (3371)..(3371): a, c, g, or t
  modified_base (4004)..(4004): a, c, g, or t
  modified_base (4011)..(4011): a, c, g, or t
  modified_base (4021)..(4021): a, c, g, or t
  modified_base (4028)..(4028): a, c, g, or t
  modified_base (4051)..(4051): a, c, g, or t
  modified_base (4055)..(4055): a, c, g, or t
  modified_base (4057)..(4057): a, c, g, or t
  modified_base (4076)..(4076): a, c, g, or t
  modified_base (4079)..(4079): a, c, g, or t
  modified_base (4081)..(4082): a, c, g, or t
  modified_base (4086)..(4086): a, c, g, or t
  modified_base (4102)..(4102): a, c, g, or t
  modified_base (4114)..(4114): a, c, g, or t
  modified_base (4188)..(4188): a, c, g, or t
  modified_base (4232)..(4232): a, c, g, or t
  modified_base (4234)..(4234): a, c, g, or t
  modified_base (4236)..(4236): a, c, g, or t
  modified_base (4313)..(4313): a, c, g, or t
  modified_base (4317)..(4317): a, c, g, or t
  modified_base (4323)..(4323): a, c, g, or t
  modified_base (4327)..(4328): a, c, g, or t
  modified_base (4331)..(4331): a, c, g, or t
  modified_base (4337)..(4337): a, c, g, or t
  modified_base (4340)..(4340): a, c, g, or t
  modified_base (4342)..(4342): a, c, g, or t
  modified_base (4346)..(4348): a, c, g, or t
  modified_base (4352)..(4352): a, c, g, or t
  modified_base (4361)..(4361): a, c, g, or t
  modified_base (4364)..(4364): a, c, g, or t
  modified_base (4383)..(4384): a, c, g, or t
  modified_base (4401)..(4401): a, c, g, or t
  modified_base (4816)..(4816): a, c, g, or t
  modified_base (4845)..(4845): a, c, g, or t
cttttttgcttctgctttaaaaataggcttctgaggactgtgaattactatcgttaaaataacaatgatggagattccatgcactgtaaagcacttcagggaagagaacaaaaatcacaggaattgaatcaacaaaggaaaaatgagaagcacaaagaaaacctaggacatttccctttttgttttaaactgggaaattctaactccttggaggaagacaatgatactctgattcaagagagaagctaaaaaagcacaagtcnnnnnnntnnnnttnnnnnnnntttttttttttttttttttntcagcagaaatcacaaatttattaactcttaaatatatcaatcagtcctttaccattatggcaagaaatatatacagtgtcccatggtaaactgcagtgtttcaaaatgatagaagataataaatgtgtaattcatttgtggtggagagaacaaatcacaatttcctcacatcttagtgcggaagacaaacttgatctacagtaatacttcaacaccacatgctaagttaaaagtgtaaaaaaaacactctacatctatttttttttctttaaatacatgtatgccacgtatagctgcttcacaaaagggtaaaagaaattaaaaagagaaaaatgaggccattattttttcacagatctcattggcaggttaacatggctcaatatatttactgtatatatttattttaaatatatatgttgttttaaattgtgtaataattatcagaaaagcttcaacccatctaccatacatccactagcaataatatctaagatgattagtaatcaacacagagaggtgagatgagagaaaagaggaagggttgtttttgttattttgtttttcttttttgcttctgctttaaaaataggcttctgaggactgtgaattactatcgttaaaataacaatgatggagattccatgcactgtaaagcacttcagggaagagaacaaaaatcacaggaattgaatcaacaaaggaaaaatgagaagcacaaagaaaacctaggacatttccctttttgttttaaactgggaaattctaactccttggaggaagacaatgatactctgattcaagagagaagctaaaaaagcacaagtcacaaagatcaagttcaaaacacttatgagaatggcaaacatttgtaagcctctctaacactagaaaactagctagtgatgatgcagaagtgaccctttcattccccaaggcggaggtgagtgcgtttgcataaaaccccctctgctatcaagttggtatcctcctggcaactgtcccaatcagtaagacgttgcagtcacaggaggaacttgcttttatcctaactttaaacaatgcaaatacctccaacatagttaggatacctaagtccaaactagagcttaagcagaattataaacctttaaaatcttgacaacatttttgtgggccctgaagatgatcaaaagtgctagtatagctaccttcaaaagacttttatttcccttttacattcattatgcaaatttcacttctattcttttctcacacactactagccagcctccccaaaaaaggaaaagggaaaaaagtaagaaaagaatggaacaaaagaaaaataagaaagcaaacgaaaggaacaaagaaacaggataaagaaaagagatcacagatttgagaaagaaaaacaattcaattcagcaaattcaccaaaacaatgtgaatatatcctaaagtgattaaactcagaaatgatgtgaatttttccagtttacacagtttgaccaaaaacagcatggctttatgtggtagcaaaccaactgattcttgcttctactttcataantgnnttttgcccnnatatcatcccacntttaattgnttaatcagcanaaactttcaangaaaaatcatccattttaaccaggatcacaccangnnannnnaaggtgtattttttttttaccttaaaaaaanaaaaaaaaaaaccaaacaaaccaaaacagattaacagcaaagagttctaaaaaatttacatttctcttacaactgtcattcagagaacaatagttcttaagtctgttaaatcttggcattaacagagaaacttgatgaagagttgtacttggaatattgtgnattttttttttngtctaatctccccctattgttttgccaacagtaatttaagtttgtgtggaacatccccgtagttgaagtgtaaacaatgtataggaaggaatatatgataagatgatgcatcacatatgcattacatgtaggaccttcacaacttcatgcactcagaaacatgcatgaagaggaggagaggacggcccagggtcaccatccaggtgccttgagaacagagaatgcagaagtggcactgttgaaatttagcatgggtgtattaacaaagaagctgacagcctggaaatatttacttgatgggtactgttggtgaccccgagcgatgaaaatgaacattctnccactttccatcccggcggtgccacacacgagtctcttctgactgcattgtctttggcattccactgccatccatgtactgtgtgagcctaatatatgctatgcaggcggcatcatcccctaccagatgtacatgagggtttagaataatagtgtggattggtttattgcttttggacaaagcattttcaaagtagaatcggtgaaaatccatcccttccactaaattacccaangcttcaggttcaaaagcagtaaggcctgggtcacagatttttgtgtaggcttcaaagtccccattgttgatagcttcgatcagttgttcagtgactttgataatctcttgctttcgtgctttcacatcttcatcctcaattgttgtatttgaactctcagttgactcctttactccatctggtttcttcaacaanctcttggctgctgagaaattccttgtagccagcatagttgtcaagatggcaccctttagttttcttctagcattaaatttcttcaagcagtctacagtctcctgtctgtgcatcatggaagcaacagtagaacgttgacagatccatgggtgcttcagtgcctctgaggctgtgatgcgtttggcagggttgatagtaagcattttattgatgaggtctttggcttcaggagtcaccgtgtcccattctggtgatggaaaatcataagctccagccttgatctgctgatagagtctgtgttggtcttcatcccagaagggtggataccccacaagtagaatatagagaatgacaccacatgcccacatatccactggctttccataaggatctttacgtaaaacttctggagaaagatatccaggtgtgccagcaaaanccaaaccacgcctgctggtccccttgaacttctatggctaagccaaagtctgccaatttcacagctgctcccttggatttgctagctaaaagcaaattctcaggcttcaggtccctgtgaactatgccatttaggtgacaatgattaacactttctagaatctgctgtatacaatgactggcatcagcttcactgtagtattctcttgccactatgtcttcaaacagttcacctccagtaactaaatcaaacaccaagtagtgaaagccctcttctgatatgctatcatgaagtcgcacaatattagggtgcttcaaaagacggcagattctagcttctctttctagtttctgatgatccctagcagaaagctttttggtgttgataattttggcagcatattcttgtccagtaggaattttcatacatcttctcaccactgagaatgccccctttccaagctcctcgaaaagctgatactcgtccgtgaacctggtgcaggttgtggtcgaagccatcctcggtccgggctgtgccctggctgggagcgcgacggaccagaagcgagcagacgcgcggctaaccccgggactggccccgcggcgctgtcacccagggccgctcttactttcntggtccnaaagtagctngcccgcnagggagtgtgcgcaggggcgggncggnangggagatgaccagaaaggntgncnngggntctcctccccacagtncgccgatcctcnctcctcctgcgggcctcgcttccttcttctccactggacgctccacccgccccttttccagtccctgtccccanatgcagggggtaaagtactcaagaagagggggccgggaaatggnanancagccaggcacgggacgagtggcaagcagttgcgaaacgatccgcactggagcaggaggagtagaagcagagggganggantccgangggnnggnaggtgngantngcannngggnccgaggccncgnagcccagagcggacagccnnagcccagcggccgctgntcagcaggctcaggcgcggggcgcgccggggctccgacgagcgtgcgcgcccgaggccggcttccctccggcgggcggcagcggctccggcgaagcgaggcaccttggcggcctcgcgctgctcacgagcccgcgcggcttcaagacggcgcggcgagagaaagagcgctcggctcaggcgaagcctcttctgccgtccccaggcctccgtctcctcctccggcgcctcctcccgccgctccctccgcctgccagcaccccctccctggcgaagccccctcctcgctggtcccacacctccctctagcgactccaagcctgtcccttcgtggatctctcgcactccctcctttggttgcacacacgagcacaccagtctagggagaaaccaggtgggtggaggaggatgtgcggnggagaagactggaggtttgggtgaatgangcgagaagtcacagttacccatttaaac

SEQ ID NO: 480 - DNA, 1929 bp, Homo sapiens
  modified_base (1088)..(1088): a, c, g, or t
  modified_base (1522)..(1522): a, c, g, or t
  modified_base (1525)..(1525): a, c, g, or t
  modified_base (1830)..(1830): a, c, g, or t
  modified_base (1920)..(1921): a, c, g, or t
ttttttttttttttttttttttttttttttttttttttgtatttaaatacttttattttcatttcacaaaaaaagcaacagtgtttgcagctacacatgcctttcagtcagtgctggtcatatgcaaaacaagttatcagaaatataaagaaaaataagccttttccctttacaagtgaaacaacacaatttgcatatacaatattatatatacatattttcaaaatgtttcacaaaagacagattatgatacaaatttagaattccacccacaagctcagactcaaggaattgaagatctctataggtgtttaaatataaaaatgtaatacctttacaagtttccaagtaactactttccaaagtatttgaaagaggctattcttcacagcaacatggaacacttggctttaatcaagacagctgtaaaactaagttttgtctcaatgtgagtttgttgattaatgcaaatgctccaattatgccataattctcattttatatacacatacatacacagcgtattattgtactgatggtttacacagtccaatttctggagcatttccttcagctaagccatgacctttacttcctttgaagtattttaaattaagaactgttcagaaatatcactaatgactaccatgactaactccaaaaaggtgcccttttttcttttatttatgatcaaatgtaaatgtgtcatgaataaacttatttttttctatggcagcaggtataagtaatagcaaagtataggctactttttcaacactagaatctgagagtttgatatacagtatgtaacatttctttgcaaattttctaggagttctatcactcaatgtttccaaaatagtaatatggcaaatcttcagcatggagtagtagtatcagaaatgggaaaacaaacaatgctaagaggcctgaaggaagggaggagagcagagagggagggagggaggatgtgtgcccatgcattttccctgatgcagacaaatgtggagttttaacatttaccatatggtagatgaggagacagtgtgatataagaatgcttaaagcgaacatacaggtctggatanatgatatgcacacaaaatacaaggctaatgaggcagcaatggcttaaatttgtgaatgccagtgaagaaaacacctaacagtataggcactaaagacaaaatggaaagcacacaatggagaacggaggagaaagatgcagtcacacaaaagacctctgggtaagaaagggccaacttgtcttgccacatgtgggggatgaaagatagaaaattccttttggatttagttttggggctcatgttctattcatcagagccatgtcaataactcgaaagggtcattccaagacacaatttctaccaggtacacaagctatgcaattgatggaatcataatagacttctatagatgaatcagaagtccaggcctcaaaaagaagctactcttaacggtttgcaaatgcgttctagacagcactcttattggcttatcngcntcgccggtttaccagttactaaaagatatatgagcaatgaagtttaaacacagctttattcaatattgtcctcttgcctttctagaatttacaaaagcacaggtcccttttcactacctcattcaatctgaatcaacataagaaatgctggatctaattagctttcacaactcaaccatagctgagtgtcttctcctgtcttatctgctgcacacctgttgctattagttacattaatacactgctacaccttccagccagatggcagggatttagtaggtctttatttttgttaggtatagtcnagaccccttgcaagggactaagtgttaaaggaaaataatggcggaagaaagaagcaaatgatatatatgcatctacacacttgcatcctnnatggaata

SEQ ID NO: 481 - DNA, 4136 bp, Homo sapiens
  modified_base (40)..(41): a, c, g, or t
  modified_base (43)..(43): a, c, g, or t
  modified_base (57)..(57): a, c, g, or t
  modified_base (66)..(66): a, c, g, or t
  modified_base (70)..(70): a, c, g, or t
  modified_base (106)..(106): a, c, g, or t
  modified_base (110)..(110): a, c, g, or t
  modified_base (131)..(131): a, c, g, or t
  modified_base (160)..(161): a, c, g, or t
  modified_base (341)..(341): a, c, g, or t
  modified_base (381)..(381): a, c, g, or t
  modified_base (508)..(508): a, c, g, or t
  modified_base (517)..(519): a, c, g, or t
  modified_base (716)..(716): a, c, g, or t
  modified_base (720)..(720): a, c, g, or t
  modified_base (846)..(848): a, c, g, or t
  modified_base (850)..(851): a, c, g, or t
  modified_base (856)..(857): a, c, g, or t
  modified_base (894)..(894): a, c, g, or t
  modified_base (946)..(950): a, c, g, or t
  modified_base (953)..(953): a, c, g, or t
  modified_base (956)..(958): a, c, g, or t
  modified_base (961)..(968): a, c, g, or t
  modified_base (971)..(974): a, c, g, or t
  modified_base (976)..(982): a, c, g, or t
  modified_base (984)..(984): a, c, g, or t
  modified_base (987)..(989): a, c, g, or t
  modified_base (992)..(995): a, c, g, or t
  modified_base (997)..(998): a, c, g, or t
  modified_base (1001)..(1005): a, c, g, or t
  modified_base (1007)..(1009): a, c, g, or t
  modified_base (1011)..(1013): a, c, g, or t
  modified_base (1016)..(1019): a, c, g, or t
  modified_base (1021)..(1022): a, c, g, or t
  modified_base (1024)..(1024): a, c, g, or t
  modified_base (1092)..(1092): a, c, g, or t
  modified_base (1172)..(1172): a, c, g, or t
  modified_base (1213)..(1213): a, c, g, or t
  modified_base (1238)..(1238): a, c, g, or t
  modified_base (1246)..(1247): a, c, g, or t
  modified_base (1283)..(1283): a, c, g, or t
  modified_base (1558)..(1558): a, c, g, or t
  modified_base (2048)..(2050): a, c, g, or t
  modified_base (2052)..(2058): a, c, g, or t
  modified_base (2060)..(2061): a, c, g, or t
  modified_base (2063)..(2064): a, c, g, or t
  modified_base (2066)..(2066): a, c, g, or t
  modified_base (2068)..(2069): a, c, g, or t
  modified_base (2071)..(2071): a, c, g, or t
  modified_base (2073)..(2080): a, c, g, or t
  modified_base (2112)..(2112): a, c, g, or t
  modified_base (2116)..(2116): a, c, g, or t
  modified_base (2177)..(2177): a, c, g, or t
  modified_base (2257)..(2257): a, c, g, or t
  modified_base (2261)..(2261): a, c, g, or t
  modified_base (2498)..(2498): a, c, g, or t
  modified_base (2501)..(2501): a, c, g, or t
  modified_base (2534)..(2534): a, c, g, or t
  modified_base (2540)..(2540): a, c, g, or t
  modified_base (2550)..(2550): a, c, g, or t
  modified_base (2558)..(2558): a, c, g, or t
  modified_base (2562)..(2562): a, c, g, or t
  modified_base (2676)..(2676): a, c, g, or t
  modified_base (2870)..(2870): a, c, g, or t
  modified_base (3114)..(3114): a, c, g, or t
  modified_base (3127)..(3127): a, c, g, or t
  modified_base (3137)..(3137): a, c, g, or t
  modified_base (3661)..(3661): a, c, g, or t
  modified_base (3675)..(3675): a, c, g, or t
  modified_base (3679)..(3679): a, c, g, or t
  modified_base (3681)..(3683): a, c, g, or t
  modified_base (3685)..(3691): a, c, g, or t
  modified_base (3693)..(3693): a, c, g, or t
  modified_base (3695)..(3695): a, c, g, or t
  modified_base (3697)..(3706): a, c, g, or t
  modified_base (3708)..(3708): a, c, g, or t
  modified_base (3710)..(3714): a, c, g, or t
  modified_base (3787)..(3787): a, c, g, or t
  modified_base (3793)..(3793): a, c, g, or t
  modified_base (3801)..(3801): a, c, g, or t
  modified_base (3842)..(3842): a, c, g, or t
aggaaactgaggcacaaagaaaagactgtaaggcagagcnngnatttaagcccaggncctggtccnttangttttgggggggttttgtttgttttacagactatantttnagagaagtagattgaggaganagctcattgaaattgttcattttctgtanngaactagaaggcctaatttcatttttatttttacttgtgtcaacttatttttagacttggactattgagaatcttatatgttgttcctaaagcgacacacctaacagcttcaaaaggactatattacagttgaacccatggtagtttggatcctactgatacttgatgaggatctttacntagtgttttatgttagttttgggtgatgtagttgagtccnccacttactgagtttacctactgtgtatgactgggctcaatgataaatagaatggttatatcaacactcaaatgagggctgacacacttcacctctccttttacttaagatctctctgcattttttnttttttttnnngaagccaagtaagcaagaagaaaaatgagagataatgcttcagtgagagaggaaaggtgctacatagagtatgagctgttaagttacatcccaggggaaagacctgggaactattgtattattctcttgaaaatttggcccagtaagctgctacatccagttcaactaacaaaatcctgtataccacagagaagaanaaanaaaaccaaactgacaaacatccttcttttatttaagaccaaactgcagctggaatacccagtacagttctgcttactacacttcaagaaagatctgaaagcggaaaaagaaccaaagaagggcagnnnanncgacnnaagggtgggtggaaggtgctgcagtatgaatactgtncgaatattttgactctggtctgaaaagataaaagaatgttatcgaaaactannnnnaanaannnaannnnnnnnaannnngnnnnnnngnatnnnagnnnnannaannnnnannncnnnttnnnncnngnggaaactaatccctaaatatgaataggtttatattgattcatgggtaacaggtccataataaattatnggaaactaggatgtctgaatatcaaggaagacagccatagtctcttacagtgcctctgttggtctgtctcaaactgaatngggtgggaaaaggtatggtccaatataaaagttccattttngccattattggcaaatcttgccttngtttattnnggtgccagtgttttctgcttaatcatttgctttgtnggcatctgtgtttatttacttgtacaccacatgcagtttacatctgtcttaactactccttcccaggtaaattccaattatatttgacatccagctaagagggcccatctcttctcacctctttcctagtcagtatattcagcaaatatttattgagcccttactgtgggcaaatcattgtactggataattgagaaaaatagataattcccttattcagtaaatgtctactgagcacaatctagtgaatcattacagtatggcctcattgtttngtttgaggtgtgttattcataacaatattttacaccattcgtatcaatgtaattatagaacacaatatacgatcaaggataagtaattgtgtggttatctgccatttaaaagtatccagtatttgatcacattattataaataatgaaaaaatgatttaatctgtaataaactggtttattgtgcagtgactgtaatatactagagttataataaattgtttactctgcctcaccaaacacatgctaggatataacccccaaaataagtatttaactttgcattaggtataaaggagactgggtgctataattagattattttgaggcagacagagagctgttatcctaactgatttagtatgttctgtaattgagaaaatgttcaccaaattatactttttagtgatttacatgtacattttataggggacatgttctgtgtatagcgaataaataacttttatagtatcacaaaaaaaaaaaaaaaannnannnnnnnannannanannangnnnnnnnncctatacattgatttcatcacatttgattttngtcntcttttttgccacatacttaaaactttccatataaaattaactaaaaatctggaagtggantttaagcttttaatttgtagcaattttgaaaatatagcagaggtatattttcaagggaggtgtgaaatggaggtattatngttngtattttattttagaaattttgtttgaacttgcccaagatcacacagcaagtgtcagatcctaggttacagcccataatttttcacttgtttcatcttttgttaccatgtttgttgtttaatccaatggggaagtgtttttatagctttattttcatggagatagtaacattgatataatgggatctagaatttacttagagtcaaagtgactagatttaattacaaaaagtatttngtngtataccgttatacactcattaacataggggtncttatngacagaggtnctatgtantttnaaaagaatatgtagaggctatagacttttttgccctctacctcccttctccatttccttttgaagttaagacatttaagggggagaattaaggtgcatattgagttggggtttngtttaaaaaaaattaggtaaatacatatataactacaataacaacagttggtagttctctaaaatatttaattatggtaaatcagaaaaggccctttaatttttgcatctgttgaatgaattgctttaggatctcttctgtggttgtttctctttatactgaatgctgtcaatattattgagcacttactgtgncgaaccatgtgcttttcaaatatttctatttaatcctaaaaacactcctgggaaatgggtattattcccattttacagatgagaaaattgtcctttgtagaatacccatcatgtgatagcttcttgcatattatgctattcatttctcacaaccttacaaggtaaatggataatgttcctggatgagagattaaacgtactcgaagatcttatggttgtgtggctcagagactctaagcatggntttccaaatctcnattctcttgntagagattttccattgtattgcattttgaccatgttcctgtttacaaaacctaagattatattctgaagtatctgtgacttgagtgatagctcaggaataatctgagggcattctattaggaaggaggactagcaaagcctatagttagcctatcctaggcatgaactattctcattttagataggatgacttgataaataggatgaagtgagcaacctgtttgtcttcggttattggtatctacaagacattctgctagtcactgtggaaaagtttccttctcttgggttttttcctcttccccttcctcttaacagtgttggttatctttattatgtttctgtgtatttgtaacagctgtttcacccttgtattgcataatggggatttttcttggaataaaaagtgaggcatgtaaattcattgagaactaaccgtagtttgtaaagaagtaaaaggcctttgtatctagttttttgcagatcacatttctttgaatgctggaaagtgaaataaactggtntaggagccaaaaanaaanannnannnnnnntnanannnnnnnnnnanannnnnaaccacctgggtacaactttttcctaatttgtgtaagaggttttagagatgcactctgtccctcttgctttancaaatngcctacangaatgcaaccaaaatactagaaactgaaacttacacaaaanctttcaggttttttcctgtgttgtagttctagggaagaggatagtttattagtatttattttaagcttaaggataggttttggacctggattccatcatagtataactgccatcgaaaagaagacaaattgaaattacagcatttacctaaggttcacagtatggctgacttcagcagccttacatggtaagttctctgtaccagctatttttggttctcgcaattgcatcgacttgggaaattcctatcaccattctctatataggctaaccaaaacttttatcagtaccttt

SEQ ID NO: 482 - DNA, 1856 bp, Homo sapiens
  modified_base (31)..(34): a, c, g, or t
  modified_base (460)..(460): a, c, g, or t
  modified_base (657)..(657): a, c, g, or t
  modified_base (1529)..(1529): a, c, g, or t
  modified_base (1617)..(1617): a, c, g, or t
  modified_base (1631)..(1632): a, c, g, or t
  modified_base (1675)..(1675): a, c, g, or t
  modified_base (1682)..(1682): a, c, g, or t
  modified_base (1694)..(1694): a, c, g, or t
  modified_base (1740)..(1740): a, c, g, or t
ttttttttttttttttttttttttttttttnnnntacaagactttgtttattaataaagtaattcattatgacttttgaaaaaaaaagttttaaaatgttctgtgtacatgtcaatgtaggttaggccagccaaaagacaaagcaaagcatcaacattaagtcacaggctaggattatacaaataagaacaaacacaaggcttatggtacttgttaggtaaacacaaccaaactaaactgtacttcaaatttgtttatataaaagcatattaaagctcactttaaaatagtgtccatcttttcttttaaacgggcatagactcatttgcagtcatgtacaaatatacctaatagctttcttcatcttttaatacaagtacaattccttgcttctttatgcaacctaacaaaataatatagaatgaagtcattagaaaaatatgaacctttctgaatctanattacatttttaatttaaattggaaaatacagtttagatcatatgaaacatatggatttcagacatgtattatctgtttctaacagattattacaggcggtctttattttggctgaaatgcaaaaatatgactttcttaataacagattagttaaaaatactttccattgatagcagtgctagtccctagaacaaanggtaagcaaaacttatttgtaagttactgcctattcaatgcccagaatatgtagatcctaaatctaagcccttaatatacatctactttaaagataactgaaagatctcacatgcctgataatccttaatttaaaccgtcctgtaaacatagtcaaaatctgctaatagaaatacaattcaagtaaacattgcatatttgatttaaaccaccttacagttaaattcactcatgacacattggatcataaccactaatatgtaaaaagttttaaaaaaatcatccttacgtatagatgaaaataaactttgtaaacttgttcatttaaaataacgaatgtactgcagctgctctttggtttggcatagtttcaggtactgaatattcaagtaaatttgttcccaggtaaaccaagtctcctaatttgtctgtaatggcaatggcaagacctgaacttcaactttatttttcttaaggtgtcatcacaaagtgtttgaaggaccaaagatagtacttctaaaatttgacagggcttcattttgattttttctccccaaatagttgatagcaataatcaataccagttgagataccaaagaggcagcctttccctgattcccacaccacttgtaggcctttgctagaatggtcattaatacgtatgaatcagttgagctaaatattatttagaacgtggcaaaatgctggctgtaaattaaatcaaagataagtaattcaaaggctttaactgaaaatttctgaaaagatgtttgctgtgctattaaagatgttaaataacaaaaattaaaagaactgagaaagactataccatgaaagtgcataatagtgaagaaaaaaatgaagttcccttgncgttagccaggtgcatgcaaatctttttatctgaatgtagaaatgcaaaaagtaccaggagaacatttctgaaagtagtcaagtatgntttaacatttatcnnccttataatatgcaaactgccaaactggagttatgtttttagntggtaantgatatatatanatatttttgagatggagtttcactcgtcgcccaggctggagtgcanaggctttccgttttaaaaaatatatcttctgttatacttcagttatttcattccactgatcattttcttgcaaatgaaaattgaaaataccagtctataatgttttcatacaccta

SEQ ID NO: 483 - DNA, 3145 bp, Homo sapiens
  modified_base (486)..(486): a, c, g, or t
  modified_base (488)..(490): a, c, g, or t
  modified_base (493)..(500): a, c, g, or t
  modified_base (506)..(506): a, c, g, or t
  modified_base (510)..(511): a, c, g, or t
  modified_base (513)..(513): a, c, g, or t
  modified_base (1055)..(1055): a, c, g, or t
  modified_base (1506)..(1506): a, c, g, or t
  modified_base (1674)..(1674): a, c, g, or t
  modified_base (2243)..(2243): a, c, g, or t
  modified_base (2258)..(2258): a, c, g, or t
  modified_base (2260)..(2262): a, c, g, or t
  modified_base (2265)..(2272): a, c, g, or t
  modified_base (2274)..(2277): a, c, g, or t
  modified_base (2280)..(2280): a, c, g, or t
  modified_base (2765)..(2767): a, c, g, or t
  modified_base (2770)..(2776): a, c, g, or t
  modified_base (2778)..(2781): a, c, g, or t
  modified_base (2896)..(2896): a, c, g, or t
  modified_base (2928)..(2928): a, c, g, or t
  modified_base (2990)..(2990): a, c, g, or t
  modified_base (3087)..(3087): a, c, g, or t
  modified_base (3089)..(3102): a, c, g, or t
gcagccctagcctctccgcacttctcgtcgctcgtccgtgttcactccacgcctggcctcgggtaggagccgcatagcgccaacggttgcgggtcgcaactactcccaggcggcgcgccttgcgcgccgggcctcccaggaccgcggcgagttcagaaggcgcggggagagaagtgaggtcgagcagcgggcggcttttgacgaacggccctcacagccaatgggaagcccggtcgactttcccgcccctgccaatagggagcagaacccgggccggggggggcgcttcccgcaggctgcggctggattcgatcctgcgcgacggccgcgaaggcgggggcggaggctcggcctgcgcggctgggagcggcttaggggaggagggaagaccggaagccacggttgcgtccccatccttagattcgctcctccgggcagggagcggagacggaggaggaggagggagaggctgaatgttggctcggnannngannnnnnnngaggancggnngnacgagagccaggccaagcgtctcaagaccgaggagggggagatcgactactcggccgaggaaggcgagaaccgccgggaagcgacgccccggggcgggggcgatggcggcggcggcggccggagcttctctcagccggaggcaggtggaagtcatcataaagtttctgtttcacccgtcgtccatgttcgaggactctgtgaatctgtggtggaagcagacctcgtggaagcgctggaaaaatttgggacaatatgctatgtgatgatgatgccatttaaacgacaggctctagtggaatttgaaaacatagatagtgccaaagaatgtgtgacatttgctgcagatgaacccgtgtacattgctggtcaacaggcttttttcaactattctacaagcaaaaggatcactcggccaggaaatactgatgatccatcaggaggcaacaaagttcttctgctctcaattcagaatccgctttatccaattacagtggatgttttatatactgtatgcaaccctgttggcaaagtgcaacgtatngttatattcaagagaaatgggatacaagcaatggttgagtttgaatcagtcctttgtgcccagaaagctaaagcagcactcaatggagctgatatatatgctggatgttgcacactaaaaattgaatatgcacggccaactcgtctaaatgttattaggaatgacaatgacagttgggactacactaaaccatatttgggaagacgagatagaggaaagggtcgccagagacaagccattttgggagaacacccttcttcgtttagacatgatggctatggatcccatggtccattattgcctttaccaagtcgttacagaatgggctctcgagatacacctgaacttgttgcttatccattaccacaggcttcttcctcttacatgcatggaggaaatccctctggttcagttgtaatggttagtggattacatcaactaaaaatgaatngttcaagagtcttcaacctgttctgcttatatggaaatattgagaaggtaaaatttatgaagaccattcctggtacagcactggtagaaatgggtgatgagtatgctgtagaaagagctgtcacacaccttaataatgtcaaattatttgggaaaagacttaatgttngcgtgtctaaacaacattcagttgttccaagtcaaatatttgagctggaggatggtaccagcagctacaaagattttgcaatgagcaaaaataatcgctttacaagtgctggccaagcatctaagaatataatccagccaccctcctgtgttttgcattattataatgttccattgtgtgtcacagaagagaccttcacaaagttgtgtaatgaccatgaagttcttacattcatcaaatataaagtgtttgatgcaaaaccttcagccaaaacactttctgggctattagaatgggagtgcaaaactgatgcagtagaagcccttacggcactgaatcactatcagataagagtgccgaatggttccaatccctatacattgaagctttgcttttctacatcatcccatttataagaagagaagagcatgttagaatttatgttcacctttattacaatttcaaagctacacttcattaaaaaaaaatctaaaatggttgatctcatgttgccttgcttactttaagatcctgttctgtaataaacatattttgccttgagtaaattngttgtaagcttaaanannnaannnnnnnnannnnaanatagaatatcataatgtagactatctacagcttcattgtagattatacagatatatgatttctaaccttattactggaatttttcttccacagtaaaaatatatttgcattcttaatgctaattatctgcaagtattttttcattgtgtaagagattaatgcaggtgaaagtattgcattttaatatagaattcctattatatgtttagatgtttaagtatgttgcagttactcatattaaacataacttgtatatttattattttaatgaagtttgagaataacgttacatatgttgaattttaagtactacagatttaactgattttatatttctgaaaggctaacagacatggatacacgtgtacagtatgcattcaaacttatttaaattggtgtatttttttttaagtcactgtccatttgtattgacatgcctctgtttctagtccagtttggagattttataaagttataacaatgannnaannnnnnnannnncatttgttgcatgtgacttaaatacagctagtatttggcattgagattttaatagaggttataattaacagttcctcttatagataataatctgggatccatgggtgggcttcanagaatctgtgtaccccctaaaattgtatgtanaattttggatatttacatttttattttttaactcttggatccatcagtaatatgtatttttntatatggtacaagatttaaggatctaattttatttttattccaaacagatagctatttgtctcaataccatttattaaacattctttctcccactgnannnnnnnnnnnnnnttttttaagataatagattttatacataggcaagtaagattta

SEQ ID NO: 484 - DNA, 2044 bp, Homo sapiens
  modified_base (13)..(13): a, c, g, or t
  modified_base (71)..(71): a, c, g, or t
  modified_base (218)..(218): a, c, g, or t
  modified_base (262)..(262): a, c, g, or t
  modified_base (298)..(298): a, c, g, or t
  modified_base (477)..(480): a, c, g, or t
  modified_base (482)..(488): a, c, g, or t
  modified_base (490)..(493): a, c, g, or t
  modified_base (495)..(495): a, c, g, or t
  modified_base (510)..(510): a, c, g, or t
  modified_base (512)..(512): a, c, g, or t
  modified_base (514)..(522): a, c, g, or t
  modified_base (1492)..(1492): a, c, g, or t
  modified_base (1547)..(1547): a, c, g, or t
  modified_base (1550)..(1550): a, c, g, or t
  modified_base (1566)..(1566): a, c, g, or t
  modified_base (1568)..(1568): a, c, g, or t
  modified_base (1570)..(1571): a, c, g, or t
  modified_base (1575)..(1576): a, c, g, or t
  modified_base (1606)..(1606): a, c, g, or t
  modified_base (1813)..(1813): a, c, g, or t
  modified_base (1860)..(1862): a, c, g, or t
  modified_base (1864)..(1866): a, c, g, or t
  modified_base (1869)..(1877): a, c, g, or t
ttttaaatcaatngataaacatgatttattactttgtctattaaagtagtttcaacacaattgaagtttanactgcactgggctgttcccatcacagtccaggattatgcacagaccagcccccaaccccagcaggggtgccctgccagaacctgtgctggatgcctaggagcacagagaccactgcccgttgttgggctgcgtgtgcacaattcatnccccgatccataatccctaagacaagaatggctgtcattgcccntgggttcactttctattcaaagaggactcatttggncacagccaatgtagtagttaaaatgcattttgagaaaaaataaatattctgtacaatgtatttacaaggatcaaatgttttgtaacccacccccaattagtttcccaattgggaaactataatttgataattaagaagcatattattggccgttagtgtcacgtcaacaaagaatgtgnnnntnnnnnnntnnnntntttttgaactatatntntnnnnnnnnnttttacgcaaaatttcacattttaatatgcttagaaggagtttttaaagaagtagaaatgatttccttggcctctgactttcagtgatgaaaatgcaaccatgcagtcccccctttgcagaagggcagttcttcccaggctttctggaagcaggggcttccgaggagtctccacccacctcacagaacactcactatgagccctgcacagacagcaggattcacaatctccaatagggatggcaggggcagcccttaaaacttgaagaggtcgatgaagtgctgcggagacacaggcgtgaagcagctgtcagggtcggccgccgtgcaggggtgtcctgagtccttccaaaagagaatgctgcagtgccgacagaaatgcagtgtgtctccgtactgctccttcgctgggtaatgtttctgaagtgcaaagtacatcaacttccattcaatatgacctttttctgaaaggatcaaatgtctacaaaactgcttttcagcaaaatggtactgacaaagcttcttccacagctgtctgtcttcactaagcatatacaacgtgggggtcacctggcctaaggtgatgatgtcccatccgtctgagaaccggtataggatgttgttcagcatgtgcagaggaaggtcactgagggtgaggccattgttcacttgcttagtcatctgaagatcctgtagctgttgttgccaggcgagaatagtttctaatcggcaaatccaaatattgatgtttcccactaatacagacttccctactcctctaataagaatgcagagggtagagcttaggtcttgcagaagatctttgattaagcgaggattgtggtggtcatcaagaaccttttgaacgattttatccaaaatgttgaagtaattcttctgtgccacgccactcaatgaagttaactgggattttgcaattagctgcaacagtttgaccacataattgaacnttcggatatcttgaattgcacttgagaagtctaaccgattaaaggcttctcccanggngcaatagccatgcctntngnntatnngtgtcatttctaaaatggtcctttttcctntttttcgatgcatattcatgctcttcattattgaatatttctccatcttcactatttaagataatgctgtgactgatgttacaacggttattctctctttcaagtttctgactacaagattcacatctcttccagccatcttctgtcttaatccaactccatccaggagatctccagtcctgacccaaaaatggcatagttctcctngcgcgcctgcggcccccagtcttcacctgacgcgcccgcgtcccccnnngnnnaannnnnnnnncggccacctgggcccgcacctgacggcgaccaggcggttattgccggaagtgggccgccgcctcccggcgcgcctcagggaagccccgcccctggccatgctgattggccggcgcggatccgcgtggcaatgttgctgcctggtcctgtcgcccgcagcgtgcgcct

SEQ ID NO: 485 - DNA, 2195 bp, Homo sapiens
  modified_base (9)..(14): a, c, g, or t
  modified_base (16)..(16): a, c, g, or t
  modified_base (440)..(450): a, c, g, or t
  modified_base (1034)..(1034): a, c, g, or t
  modified_base (1453)..(1453): a, c, g, or t
  modified_base (1661)..(1661): a, c, g, or t
  modified_base (1798)..(1798): a, c, g, or t
ttttttttnnnnnntnataaatggagtttttctttattatatcatatttctaaatcaaggaagctgaaattatatacttaaatatactctggtcaaaatatacatgaaccacaaatattaacttctacctaccaacaatttacagttatgttgtatgtggaatttcattcttgtcagaactcacaatggaaataaaatttctattatgggtgagaagatgagggaaagaattaaggggaaaaaatttggacagcacacacttttctttcattccaaaggtgccagtcagaacacagatccatggagttccacatctagccccaggctaccaagcattaattcaatgtaaatggtgtcactacaacatcaaaaagagcagtgctaggcagaggattttgtataaaatcatctaaaactctgaaaaactacaaaagcatctnnnnnnnnnnnttaggtaaaagcaatggagtttatttcagtgaaattattttaaattagatatgatatattaagctcccatatgccccaacctggtagaaaagttcctctcagtgagaaatcatttattttaatggcaaaatttttacatatcagtaaaatctgttatacttaaaactatgtatacagtacatttctggcaaaaaaccttatacatctttcagttgtcaagacaaagtaaaaatatggttgcataaagtcacaaaaaatataaactgctgaaaagataataaaaaaagattaaaaatcatttgcattgcctcccttacctcttcaatattagtaacaatttgcaaacaacaaaaaaattgtgaaaattctgttgcaaccttgacacacttaaccaaaggttgtcatttcaaatatcctagcttaaaaaagaatttactgcaattgtctgtgcatttatcatactatttatagaagtgcaatatttaaatattttcaaaataaaacacagtaactaaaatgaatcacaataacttataagagaagcaaagtttacaaaattaacaatttttaaaaggtcctatttnaattggttcctccttttcttcccccctccccacaacagcgtatatagcgccattacttaattccatatacaaatttgtaactttaaaaatacagtcttctgttaacatcaggaacattatgctgcacttagagaccctaagtaaaattagaatcccctaaagagagggccacataaaaagtaaatacagttttgaactcatatttaaatggaacttctattactttgtacagctttcaaattagaagttgaatagaacaagccctggacaaaaagcagcaagatttttcttttgaattcagtgcatgattctagaagtgcttgagtcaaatctactagagtcaccatttatgcaagctatcatgacatttgagttcattatcatctggttacataagtgctcactgtatttgccaaaantaatcctaaaatatgattcttaaaatagaaaaaatatagctctgttgcaatgggaaaatgattaatacaaaaaaatcaatttcttaaagttaacataaggcaaatataaatgatacaatattatcatacacgataccaattttatctgaggtgactacatcttcatttacatctattgtgtgatgcaattaagaatgacaaaaaaaantatcagtgtaaatcagaaatcttaggaaaatccagtatctttaaaaagtaatttaagcccaaaacaaatgtgaccacttattaatagaattgatttgttccatattttatcaaaataataataatgttatatccaantaaagagttataaccaagtgtcatatgtaaactttaattggatcctagtttgaaataatcagctataaagaaatttggagttaacttcagaaatttaaatatggcttgattagatgatattggggaattattacttttacaatggtattacggatttttaggagaatgtcattatctgtaggagatacttgaagtattttcacggtgataagtatgtctgtaacatccaaatggttcagggggaaaaaagcatatatacatacacaaacaaacacatatatgcatatatatgcataactagctgtatctatacatatataggtatagagaaaacaaatgacaaaacattaacaactgctgaatctaaatggtagatatacatggactcaggtggtgt

SEQ ID NO: 486 - DNA, 2254 bp, Homo sapiens
  modified_base (175)..(178): a, c, g, or t
  modified_base (183)..(186): a, c, g, or t
  modified_base (415)..(417): a, c, g, or t
  modified_base (420)..(421): a, c, g, or t
  modified_base (424)..(427): a, c, g, or t
  modified_base (429)..(431): a, c, g, or t
  modified_base (433)..(436): a, c, g, or t
  modified_base (438)..(440): a, c, g, or t
  modified_base (442)..(442): a, c, g, or t
  modified_base (444)..(444): a, c, g, or t
  modified_base (454)..(454): a, c, g, or t
  modified_base (497)..(497): a, c, g, or t
  modified_base (589)..(593): a, c, g, or t
  modified_base (596)..(604): a, c, g, or t
  modified_base (606)..(608): a, c, g, or t
  modified_base (1086)..(1087): a, c, g, or t
  modified_base (1107)..(1107): a, c, g, or t
  modified_base (1372)..(1372): a, c, g, or t
  modified_base (1443)..(1443): a, c, g, or t
gcacaggacatctggagcatctttgaatgggccattactctgggcatcacagggaataaacaggaaaaccagacacaggaactccacagtcattcagccactttgtacagggacaaatatttcactctactggaatagtcccagggctggggagtcggggttagggtgctggacnnnncatannnntgcccaggaatagactgacagtctgaatcaagatgaggtttaaagcctcttttggtaagaggctggagggttcccaaaagcatttttaaaaggctgttacaaaaatacggacctcttactacaggaaatttcatttacctggaaaattgtacagtgagcctcactacctggcaatgctacaatttaacttaactgaatggttacctcatctacttaacattcatagctnnnttnnttnnnntnnntnnnntnnntntnttaaataaanaaatttttatttaagaactgaaaaagacttttttgaagttaanattttagaaatatttaagcgtttatcataaacattcacatacatttatctctgtaaagtggcccaagaacagttatttcccttatttagaannnnnttnnnnnnnnntnnntaattaaactttgattttattatgtacatggatactattaaaaaggtgaattcgtgaaattttaagattgtgtataacacataaaagtcaaacttctaatttggtaagtaaataatcctaaacttaacacagtggttctttaaaatgtttaaatatttgtcttagatgctgaatatagacaaagagaactgtcatcttaggagtaaacacactataactctgtaaaaagaaatcatagaaaagtaaggtagtatttctcaaataagtcctcccatgctaaaaccacagtgacgcgcagacactagcctagaacctattccagtactgcaagtactgacaggctgcaaacaccagtaacaacctgcctggagccttgaccttgaaaacaaatggctgttgtgaactgatgtgaccaaaccaagagatggttccttacaaaaacaaagcaaaacacaagatgaaaatcaagcagaaaaannaaataatataaccttatttntgagaacacgacttcatctcaaaggatactttttgtatattaatcctcacagattaataagagcagttaaaataattttgtgtagatccagaatacaacaggtgactaagttaatgactaacacaatttacagacttcaaaatgataatactgaattccaaatttcacagcataacagatgactataatatactaccctaatcaactcttatttagtgtctatacagcatctacagagctcttcatccatcatatttctcctctnagactttctgtgttcatgactcattttcatccatttctgtcggagaactgctttgggaggagcagagcgantaagtgccatactccggtatgggcctgtgtggtggccagttgttttcttgcaagagtgatcttggagataaaataaattgagtctcaaaaaattccaatgactcgccatcttccttctccatcagaaactgatactctccgaatctgaccatgcacctgtatggcaggtccattttatttaggtagcccagctctctgctgtccacgatcagattggtctttttactcatattttttatttcaaaggagagaactgagctgttgaattttttaaacagctgcagagaaaactgaactcgggaaacctgtttgtcctgaaaagtataatgacagatgttggaatttcggccaaatttcaccacttcgctggaagggagtttctctctgttaaaacttattgactgaaatattccacactgcaactggccaggatggtaaaccgtcatctggagacaagttactgtctcttctgtgtcagcatcttcaaaactggtcatgatgtgcacaaggcccacctggggctggggagtcagtgaactctcttcagctgttcggctctcccggctcagagcgaggggaatcgaggagactgggcgcaggatgggggtggacacccggccgctgctcctccgcgcgggtaagtgtgagccccggggtgcggggaaccgagccagggaccagtgaccgcgagccgccgatcctcccgcgctcccgcgcgcgcggcctgccttcccactggctggcagagcacgtcctctcgcgcccggggcctttgtaaagagcgcagcggtggcgcggaggttttcaggcc

SEQ ID NO: 487 - DNA, 1846 bp, Homo sapiens
  modified_base (65)..(65): a, c, g, or t
  modified_base (566)..(566): a, c, g, or t
  modified_base (574)..(574): a, c, g, or t
  modified_base (591)..(591): a, c, g, or t
  modified_base (909)..(909): a, c, g, or t
  modified_base (1247)..(1247): a, c, g, or t
  modified_base (1417)..(1417): a, c, g, or t
  modified_base (1420)..(1420): a, c, g, or t
  modified_base (1456)..(1456): a, c, g, or t
  modified_base (1479)..(1479): a, c, g, or t
  modified_base (1525)..(1525): a, c, g, or t
  modified_base (1543)..(1543): a, c, g, or t
  modified_base (1557)..(1557): a, c, g, or t
  modified_base (1626)..(1626): a, c, g, or t
ttttcaaaaagaaaaaatttcactttaatccagcctcacccccacatgtgtgtttcacacagacnttattttttaaacagagtttattgtatttaatacattataaaatttgaaaaattgtaggaaagcagcagacttgaactggagcaattctaacaaggaataattctggccccttggcaaaactgatcagttttaaaacaaagtaaagttcacatctgtgaggtggacaaaaaagtgtgacttctgtacaaactacatttaaaatttcatgtctaacatctttgcaatgtgctcatgagggtttttctgaagtcctgcctggtccctgcctaaagaaagacgtggaacctccatatacaaacaaacttgattcaaggtgttttgtttgttttgtttttttaaaaaaaaaggaaaaagaaagacaaaggaaaaaagaaatatggatggctgttgttggcaatggaaactgtaaggagactgtgtcctcaccactcatggcttgtttatttgtcagaggcctcgggaggcccaggacacttcacggccatcacagcaccaactgncggctgtnacctttttttttttttnttttttgcatttcctaccttttgacatatatatatatatttatatattttttacaccttgaggatatcactattccaattgttcccatatgaatacaggtgtggtctctattggatataaatgtgtcttttattcgattttacgtccaggacttggtttgctgtcccaactgcacataaatgtcccttttttgtttgagttattggttgtgtgtgttttcctttttgcataagaaatatgtccatttagtccagaggctcttgctttatccggatgacggagggtacacggggcgtccgcctcagttcccgccgaagnacgtattcgctgaactgggacgagtctactcctcccccacaggagcccacgatttcaaatcctctttgctgcaacctctcgaggacctggactgagttgaggtgacagtagccatttagtggaaacctgatgacgtgcgtcgagtcgtgattccagcctgcattgacagagttacacatcacgtcgccgatctctggaaatacttcttctatcaaggatttgtcaccgcttagcgtgatcctttctccgaggtctggggccacacgcacgacgaggcactcacagggccttgaaaatcgaccagtttctctgtcctgcttccatctttccatctccancaacatgggctgaagctgaaaatattttgcctcttcatataacaaagtgtagtccttgaaatcatcaggaatgaggagtttggatgttcgtagaaaattcaagatatatctgaacatctgtccatctctgtcaatgaaatagtgctgtttgagactgtccaaaacaatgngcnctgtaccatcaaaaagtcttccgattctggattcanggtatttggtgagggtggccagnctgctggtgtacatgtggccgcccacatcaatgtggacaggcgcantggattttgtgagttgtnctggagtagggatnccttggttgttcagtggagatgcaggggatctagtgatcagaggtcttgacatattgggccgactgtcntttggtgatggatttgcctttattcatctgcaccctccatcccagttggtgtgcagtgcaggcttgaggagaaaaagctagtgacgggagctgtagtcccagctactggtgaggcaggtggtggctcgtgccgaattcctgcagcccgggggatccactagttctagagcggccgccaccgcggtggagctccagcttttgttccctttagtgagggtta

SEQ ID NO: 488 - DNA, 1100 bp, Homo sapiens
  modified_base (24)..(28): a, c, g, or t
  modified_base (288)..(288): a, c, g, or t
  modified_base (984)..(984): a, c, g, or t
  modified_base (1030)..(1030): a, c, g, or t
tttttttttttttttttttttttnnnnntttgataaatgtaatttttttttttttaaagaaaacacagaacaagtcctaaatcagacaaattgcacaaaagagagagaagaaaattgtaagcttcctgggagaggaagagatgtccatgagaaaaccaactgggatgagcctacaaaagcatgtccctctctctcctaatttacttagtctcaactgagcccaacaggagctggcctctgtcccagctgcaggatgctcccaaggcagtgtccaagagcctggaaggnagcttttatcagcaggttcagtacagcaggaaaagccatcctggcaaagagtccagtggtcctattagcgtaggctgctgctgctgctggcctgggagctgcccatacctgggtggtctggactatgtcgattcttctttttcttcttctctttcttcttccttttccgttcaggatcctcttcttttttctttttcttcttcttgtgatctgaatcagatggtgtttctggggggacaggatcctgggtacggctctgtttgtgcttgtgcttattcttcttcttgggaggctgaatatgcatcagacgacactgctccggcaacgggccagtgtggaggcggaagccggccagcatggtccctgtgataggattgaaagagctactgagaatagggggcttctcaatgagagagcggaggctgctgttatcatgggaaccaggcagatcaatcatccctggcaggtcaggcaggaagttacttagcttctccttcaccttcttcccacagaatttattataggcttgttccaagttgtagtgtgtgatcagattcgtgctgcctgtcagctctgtgctacctggcagttccctcatgaggtaaaaagggccacagccagctcctgacttgtccgcgccaggaggagccgtggccgcggtgggaggcggggccgtgccgggtcccccgcccgcanggaggcggtggcgggggtggaggctttcctggtccgaagccgagtncggttgggggcggtggtgggtcagcctgagccccaaacagtgccgtgaaattctccatcgtaccctccgc

SEQ ID NO: 489 - DNA, 1880 bp, Homo sapiens
  modified_base (89)..(89): a, c, g, or t
  modified_base (93)..(93): a, c, g, or t
  modified_base (96)..(99): a, c, g, or t
  modified_base (102)..(103): a, c, g, or t
  modified_base (106)..(106): a, c, g, or t
  modified_base (109)..(111): a, c, g, or t
  modified_base (115)..(117): a, c, g, or t
  modified_base (121)..(121): a, c, g, or t
  modified_base (124)..(125): a, c, g, or t
  modified_base (131)..(133): a, c, g, or t
  modified_base (136)..(136): a, c, g, or t
  modified_base (141)..(141): a, c, g, or t
  modified_base (145)..(146): a, c, g, or t
  modified_base (241)..(241): a, c, g, or t
  modified_base (738)..(738): a, c, g, or t
  modified_base (784)..(784): a, c, g, or t
  modified_base (910)..(910): a, c, g, or t
  modified_base (1553)..(1553): a, c, g, or t
  modified_base (1557)..(1557): a, c, g, or t
  modified_base (1559)..(1559): a, c, g, or t
  modified_base (1575)..(1575): a, c, g, or t
  modified_base (1582)..(1582): a, c, g, or t
  modified_base (1586)..(1586): a, c, g, or t
  modified_base (1595)..(1595): a, c, g, or t
  modified_base (1616)..(1616): a, c, g, or t
  modified_base (1645)..(1645): a, c, g, or t
  modified_base (1660)..(1660): a, c, g, or t
  modified_base (1678)..(1678): a, c, g, or t
gtggagatgaggtctcagtatgttcccaggctagtgttgaactcctgagctcaagaaatcctcctgcctgagtctctgaaagtgctggnattncannnntgnnccncannnacannncctnttnncacaannnttnacaancaanntatattttctaaaactatccagatttcattatcagggaaaagtttgcttaggtttattacagcagtcctttgcatttgtatggtaatttgtactntacaaatactttgatatattataactctattggtctttgaaacaaagcgatacagtgtaggtggtatcattctctttctcactcagtgtggcccagagttgctcagaattggagcagagcctgagacgtatctgcagatcctgtcatcagctggcaagtccaggagactgtgtcatttagagactgtgttgttagttatccctcaacatcttctaaggtggcaggaaataatattggaaataacattttaaagtaaaaattttaaagtttaaagaagagttttgccacttaaacaggggagctttgtctggaaaatacactgagttgaaacacttcatccttggaaggattatataagatgaacagttgtgataaatgtgtagattagagggatgtgaatgggcagttagtccagtgccctcatttaagaggccaagatcctgattcagaggaggcatcctttgcccagagctgcttagctaatctgaccaaatgtngggaaaaatgtctcacctaacccactattccttaattatggatttngtgaaaaacaatagaacatgttaatgagtaatttatattagttcgatgtattacaattttttagctttaaattacagttttcttataatgttgaaatgttttagaatcctttgaatctaagtattngtttcctaaatgaaacatttgtacaacatttgatgtttttacttatgaaatattctcctcccccaagaaaatttaaactttttctctctatttaaaagctaagaaatgttttaaaggaaaaatgaaattatcttcctttagcttatttttaaggtaaaacagctttttactctgttattgtggtaatggacagaatattacatacaaaaatattctgggagagctttttcctagttggttttaaatcattgtgccacctgaaaggtttttagattttataggagctaatttgtccaccagcattaatgtaacacagtgtagttatgaaaatatattgaaggacaggaagtggacacgaagtgatttttgtaacctgagcagttaatgaatgtgccaacattttctaggaagggacagcaagaatattctgctctgtagttaaaatactggctggcttttgatgtcttcatgcttaattgtgatcactttcttgcactgtgatgtttttacgtgaatatgttgaagtagaagtctaccatattattttataaaatgttttctgtatggcaataaactgaaaacatggatcaacccttcttttgaaaataaactgagtcaatttagccttttaaaaatatagtcnatcncnttttaaatagaatccntcttccnaccnatcaaggcntcaacattttgtaagcatccnaaaaaattggtaattagggggcttgcacntaaatttcactatcnttcagtagagaggaactntttggaacttagatttccaatgtgtatattctaatggagaaagcaagaggtagagtttgtatgtttgacttaccttagatttttattttccatacatactgcaaatgattgacttgttgcataaatgaagatcttctgttgtgtgcttttcaaacactgtaaataaatttgaaatttgaataactttccacagtataactgt

SEQ ID NO: 490 - DNA, 2154 bp, Homo sapiens
  modified_base (557)..(557): a, c, g, or t
  modified_base (779)..(779): a, c, g, or t
  modified_base (839)..(839): a, c, g, or t
  modified_base (879)..(879): a, c, g, or t
  modified_base (908)..(908): a, c, g, or t
  modified_base (944)..(945): a, c, g, or t
  modified_base (1742)..(1742): a, c, g, or t
  modified_base (1749)..(1749): a, c, g, or t
tttttttttttttttttttttttttttaaacataaaatgctggtacacatttattcttttattgctaaacatcaaatgccggcaattacgataccttcaagttaaagcttaagaatgaattacaggacagtcagaagatttatagaaaaaaacacctgtgcaccattagtatgtgaacattcaataaataccataggacaaagtgatgactgagagccacaatatctatgaagcacatgtttacaatttgctgttagaacagacaatgacctgtaagagcgattatcaaaaggtcaagtttaactgcatgtcttttcaaactgagatgctgaaaagaatatatacattctttacagattgtaggtgattaaaaaaaactgtcaaaaatgtaaacaatgcagagtaggaacactgagaataaagttttactgttgaacaaagtgacaacgcagaaagaacactttcttcaatcctcaaaataatccatttttccaatcactctacagaaaccacagtggattctttccatgaagatgataatatgccagggacacaangaccctccaagttatttttttatgtgaacatatatttacagtaaatattcaataatactttttacagcttacttaaatagaaacatgctttttctaatccataaataacactaatcattatccattcaactgcatttattaagtacttatgtctcatgcactgtgccagggatgcaaagatgaatatgatatggtccttgctgtagaagtgcccacaaccangctaaagaagaaaacacgtaacattttctttcttacataatgaggccggttttatacaantggtactgatctgctctttcctagtaaagtggttcccaantcctgatcctatgggtcaacagatcaaantgtttaacagttgaaataaaatgagatttgggtttnntttttttactcagaaaaataaattaatgaataagatttcctctattaaagttttttcttggtttttaaaaaagtgacttgcacatatacaaccttttcattagtaaaattgcttagttcatgcaatcaaattaattatataagtatttcatggcattctccaagctctactacttgaacaggtctgactgagcattactatgctaatgtactctgatcccaaatgattgtctacctaaaaatagaacaaatactgtattttctggaataaaccaataattcgtatggttttagtactggtattaactgatgacccaagtcattaataaaatgttaaaattatattcaacatctaattactgttaaggcaaatttgtaatacaatctaaaaagtttcttaaaaatgattaaaaagttttagtgcttacagagcaactcaataatctgaaaaaggtaaccccatggaatacatcactcagtaaagaagttggatagatggctattaatgagttattgcccttagtcacttctgagtatacaagagaagcatgtattttccatcaaagaaacagcaagctcatatactcctaggaccaatagcttcacactggcctgctgactccccaaatttcccagggctgcatctccactccaaaagacctcaaagcaggcgtggctcttctgggctcaagaatcagttcccaagccctggaaaatccatgtttgtactcacgtatagccattctcactatactaccaagtcttctgtggacccagagaggtagcttaggagagagncagaaancaaggactaggtacttaataacctgacacagaaaaacatgggagccgctggtgaggacagagtatggctcagagtttaaggtcattgcttcttggagacaggaacccaggagctaggccccagatgtcctgagcagctcaagagaaaatgtttaccctggaagggttccaagcttcaaagctctatagagaatgggaagtaggactgctgaagatcctctggggtgtcttgtgatctgtcaggagacccggcctagttccgaagttcaaccccaactgcctccctctgctcacatgctgctggtgtgtgatgcttcctgcagctcaccgtggatgtcaaagctagtgctgctttatgagggggcagagactccttataaaagatgcaactcttgtggggcaaaac

SEQ ID NO: 491 - DNA, 819 bp, Homo sapiens
  modified_base (90)..(104): a, c, g, or t
  modified_base (107)..(107): a, c, g, or t
  modified_base (112)..(112): a, c, g, or t
  modified_base (114)..(114): a, c, g, or t
  modified_base (120)..(126): a, c, g, or t
  modified_base (179)..(179): a, c, g, or t
  modified_base (329)..(329): a, c, g, or t
  modified_base (657)..(657): a, c, g, or t
  modified_base (663)..(663): a, c, g, or t
gaggcccccccacctcgcccggctcacacccccaaagggagggacccacattgcacacactgtaagaaatgcactttccgaggaaggggnnnnnnnnnnnnnnnatnggggngnccggannnnnnnagcttctcagccagggtgggggtcgtggagtgggggagggaggccagccgggnctccagaggggtcagggcgcgacgagaaccaactctttacctaactttgcatggtgcttagtcaaggactcctgcgacctggctcccgaggtcagctggcggcgctgacacacatgcatggcagactatccctggctctatctccctgtncctcgccccctccaccccccacttcctctttaaaaaaaaaaaaaaaaaaaaaaagatacaagaaaaacctttaaaaaaattccatgtttcctaatttgcacgaaattttctaccacaagatgtgccttgccttccgagaataagtattacctttaaacaatatcagcgcacacacatagctgcatgttctgctcgtgtagtttaaaaaaaaaaagacaaaacagtgacatgaaataaaaaataaaaattgaaaagggatgtatttctatttgtaaaaaaaataaaataaaaaataagaaagtgagaatctaaaaaaaaaaaaaaaaanaaaaanggagagaaaacaccacgctaaagattcagacgccactggagaagacatttggcgccccaggtctacgccagcccctgggtgtcctgggtcctgggttcccctcctggtggttattcagggggtggccccctgggtggctcagctttaccacgcccc

SEQ ID NO: 492 - DNA, 1344 bp, Homo sapiens
  modified_base (67)..(78): a, c, g, or t
  modified_base (80)..(80): a, c, g, or t
  modified_base (82)..(82): a, c, g, or t
  modified_base (84)..(84): a, c, g, or t
  modified_base (86)..(90): a, c, g, or t
  modified_base (92)..(93): a, c, g, or t
  modified_base (95)..(97): a, c, g, or t
  modified_base (99)..(100): a, c, g, or t
  modified_base (103)..(106): a, c, g, or t
  modified_base (288)..(288): a, c, g, or t
  modified_base (611)..(611): a, c, g, or t
  modified_base (872)..(872): a, c, g, or t
  modified_base (882)..(883): a, c, g, or t
  modified_base (885)..(891): a, c, g, or t
  modified_base (893)..(893): a, c, g, or t
  modified_base (1022)..(1026): a, c, g, or t
  modified_base (1215)..(1215): a, c, g, or t
  modified_base (1282)..(1282): a, c, g, or t
  modified_base (1306)..(1306): a, c, g, or t
tttttttttttccaagagatttacttcatctttattaacagtaccatagtattccactgtctagtannnnnnnnnnnntntntntnnnnntnntnnntnnttnnnnttgtttcaaatcttttattattagaaaagtgctgccagaaacatccttgccatgcttctgtatgtactggtgctagtgtttctatcagataaatttttagacatgaagtgaattactaggcataggaaatataatttacacttttgatagatactgagtttttgctcatttgctacatgaancagaggcagagtattctgtgtggggtttgggacaggaacactgacccctgaagtcgagcctgggggtctaacatagtggtcatttgtccagcctgttttatggaaggaactggactctgagctttggggaatttcctgcaagataaatgtatatcccacctatactggtaacaggtaagttatgcacaaagatgaaaagacaaagccctagctagatcagctcttgctctcagcactacaatggccagcggtaattctttcagttaaaatgacaattaatacagtttcattgaagcttcaaacagagcagccagatcctcttntgactggggacggggtgcaagcttggtgaccctttcctggggcagcgttcctttcactagtgcggggatatcagctttggagtaaccaacagctgctaggccatcatcaacatccagatcgaataagaatttccggagcgtgtctgccaacaccagccctgcatcttggatcctggcagtgcgggtgtcggctcccagtatttctgccatctccaggtgtcgctctggaaacatctgggccgtgaaagtgaacaccgctgnggacgtgagnncnnnnnnnangccatggggctggggagaaacgaaatgcggtgaccggcagatgacaaagctgttcttccctgcatattctagatgttaagttactttaccccatactctaagcaggcgagaattggcaaatatatttannnnnccagtgggtgatccacattgtaatcctttgctttatacatcttcactaaacctgaaattgggtaagacattccatggctagaaaagaaagaaaatccttatgttcatacacagttatcaaaattcaagtcaacaatagaaagatactcttatggggatgcctgtcacggcctctagacagtatcattanctgaaaaagtgatatgttctgttttcttggatataaggatatattatgatgtctagggacatgtagntgcattcattaacaaaacctctgnaaaatgctcaaattcaaatggctcataggaattgtatg

SEQ ID NO: 493 - DNA, 2032 bp, Homo sapiens
  modified_base (143)..(143): a, c, g, or t
  modified_base (675)..(675): a, c, g, or t
  modified_base (736)..(736): a, c, g, or t
  modified_base (748)..(748): a, c, g, or t
  modified_base (750)..(751): a, c, g, or t
  modified_base (754)..(755): a, c, g, or t
  modified_base (771)..(773): a, c, g, or t
  modified_base (775)..(778): a, c, g, or t
  modified_base (780)..(781): a, c, g, or t
  modified_base (784)..(784): a, c, g, or t
  modified_base (786)..(791): a, c, g, or t
  modified_base (794)..(794): a, c, g, or t
  modified_base (796)..(798): a, c, g, or t
  modified_base (1060)..(1060): a, c, g, or t
  modified_base (1167)..(1167): a, c, g, or t
  modified_base (1177)..(1177): a, c, g, or t
  modified_base (1197)..(1197): a, c, g, or t
  modified_base (1248)..(1248): a, c, g, or t
  modified_base (1252)..(1252): a, c, g, or t
  modified_base (1291)..(1291): a, c, g, or t
  modified_base (1702)..(1702): a, c, g, or t
  modified_base (1707)..(1707): a, c, g, or t
  modified_base (1721)..(1721): a, c, g, or t
tttttttttttctttttttttttttttttttttttttttttttttttttagttatcatacatttatttttaacatagcaccccagtttcacatcatgtatattttccaaagttggagatctttaactatgttcttcacagacntttcaacaagtgtgaaaaagaggcagtaaggttagcttgagtctacaagtcacaatccaaatataggacacctatgtttaaggtcaatatacataatgttcccaatgcttagcaaatgaatgagactctggctgagtaaaatattaacacaacttgttagcacattatcatgaaaagacagaaggcatcaaatatatactttgctgttacactttttactgttcaatgtacttgtagtgaaaaaatatacatttttactttcaaggttaaaatagaccatcagctcattatctctcttagccaatagctatgaagactaaaatggctcttcttgcttctggctcacttgaacatcttatttgtgctgaagacaaaaaggatagcagtgctaaagaaaagggtatacccggttcccaagataggtgcggttgaggttctcgcacaaggtgacttaaaacaaaaataacacaactcagttgatccaatctccacacaatggggttgcataatcaactgttccagccccagagangagctccctgaaagagctttaggatctggccctgttgttcaacagagggcttcaggatggnactggtatctgnannttnntttactgtagtttccnnntnnnnanntangnnnnnntanannntggtgtctgctggtcttcagagtcataaacccacttctctaatatcccacagccatgacattagcttacagcaagaccagagtattcacaaaacatgaaaaaatgagcatttcccaattgttgacagcagagcaaggcttctgtaactagaacatgtcctgtgtattgaaaccctgcaatgcctcctagaaaaggttcctttatcatcatgtgtgttggcatgtgtagaaaataactatacaagcctaaaagcaactgtgtncttcagatgtcttgctcatactaacagactgactgctttagggcatgcatgtaacacagcctccaaaagccttttttagaagagggcaacagctcttcgaatctgcnttgcgttgcnttttaaagtctggccctccnatgtctgctgctctcgggaaattcacataaccagatgcatttctccttacnaacnagcgaagcagggtggctcacagagtaatacccacattcnaattgccatcaatgactgacctatcagtgttggtaggatctcccctagcttgtgctgaaggaggaacaagacatgtgagctgaggactccaaaaacacaaatccccacttcttactaggaaattgaaccatactgagtcatgatacaaaaaaaaaaaaagtaacaaaacacccataactaaagtataaattcaactgatcctttgaaatcagagttttaaaagaatacccttgaaacagtaaagcagttagaaagaaaaaccagaattactagtgttctctttaaacacagtgggaaaacacctcttaactactatttcattttgttcacattcagaatgttcaaaccagaacctaatgatccctacttgtcaataatatgggaagctctggttgccatgatacgttatantgttntctttttatttttnaaaccacattcccttggtgatatctagtgagaaggtgtgattctagtttgtgttgaacaaatgtttttagctctaaggtgttacactgtaattgagatgtttccaactactgcttaaaagaagacattggcaaatgcctgccttaattgcaaaaaacacatgaattccaatattaccttattgatcttctgagtacacatctattattaccatggctgtgagatcatttaagaaacagacaaatgtcatttagaaacagactatagaatcaaatcacaactaaagagaatgctttatgatagctcagacag

SEQ ID NO: 494 - DNA, 1936 bp, Homo sapiens; identical to SEQ ID NO: 255
  modified_base (27)..(27): a, c, g, or t
  modified_base (220)..(220): a, c, g, or t
  modified_base (237)..(237): a, c, g, or t
  modified_base (253)..(253): a, c, g, or t
  modified_base (292)..(292): a, c, g, or t
  modified_base (300)..(300): a, c, g, or t
  modified_base (312)..(312): a, c, g, or t
  modified_base (329)..(329): a, c, g, or t
  modified_base (340)..(340): a, c, g, or t
  modified_base (342)..(342): a, c, g, or t
  modified_base (367)..(367): a, c, g, or t
  modified_base (740)..(740): a, c, g, or t
  modified_base (1223)..(1223): a, c, g, or t
  modified_base (1230)..(1230): a, c, g, or t
  modified_base (1234)..(1234): a, c, g, or t
  modified_base (1239)..(1240): a, c, g, or t
  modified_base (1242)..(1257): a, c, g, or t
  modified_base (1259)..(1263): a, c, g, or t
  modified_base (1265)..(1267): a, c, g, or t
  modified_base (1269)..(1274): a, c, g, or t
  modified_base (1277)..(1278): a, c, g, or t
  modified_base (1280)..(1280): a, c, g, or t
  modified_base (1290)..(1290): a, c, g, or t
  modified_base (1301)..(1301): a, c, g, or t
  modified_base (1305)..(1305): a, c, g, or t
  modified_base (1309)..(1309): a, c, g, or t
  modified_base (1316)..(1316): a, c, g, or t
  modified_base (1319)..(1319): a, c, g, or t
  modified_base (1321)..(1321): a, c, g, or t
  modified_base (1343)..(1343): a, c, g, or t
  modified_base (1348)..(1348): a, c, g, or t
  modified_base (1350)..(1350): a, c, g, or t
  modified_base (1359)..(1359): a, c, g, or t
  modified_base (1364)..(1364): a, c, g, or t
  modified_base (1370)..(1371): a, c, g, or t
  modified_base (1376)..(1376): a, c, g, or t
  modified_base (1883)..(1883): a, c, g, or t

SEQ ID NO: 495 - DNA, 1005 bp, Homo sapiens
  modified_base (84)..(84): a, c, g, or t
  modified_base (86)..(86): a, c, g, or t
  modified_base (88)..(93): a, c, g, or t
  modified_base (96)..(96): a, c, g, or t
  modified_base (109)..(109): a, c, g, or t
  modified_base (113)..(113): a, c, g, or t
  modified_base (952)..(952): a, c, g, or t
  modified_base (955)..(955): a, c, g, or t
  modified_base (958)..(958): a, c, g, or t
  modified_base (960)..(961): a, c, g, or t
  modified_base (963)..(965): a, c, g, or t
  modified_base (967)..(971): a, c, g, or t
  modified_base (990)..(991): a, c, g, or t
  modified_base (993)..(997): a, c, g, or t
  modified_base (1005)..(1005): a, c, g, or t
ctgctgcgacagccacgatagtcacttgctcatctgaaaatgccttgcactttcgttttcactagcttcgtgtatgacgcaaancngnnnnnnttnttttttttttttntaanagtaagaaaaatatacaactatatttaaaatacttaaattaacaagatagtacttttccattctaacaaaatatcatacattcagtttaaacaagagttaatatccagacacacgttttcaaaatacctgatgctagttgaaaattagtgaccatgaggctttccaagatatttctaattagcaaactgtgtacaattttgaagaagtgtacacaccgtgctggaagacagacactgaacaggtcaaaatgcaaactcatgtatctttcatcaacctaaatcttgttgcttcacttttctaaatgatactttggctgtcagcgaatcttatagcttcttttcccttaaagacaataatatataacaacaccaccccacacaaataaccataaacttctttgtgtgaaataagccctatcaaaatgtgttcatgtatttctgtaccaactgatctatactgagactgtcatgaaaaaggtatcaaacaagtgtaacaggcctacacttaaacctctgcctcaaaggagaaatcagatacttgccacgttattgcaaagtcaaagctgctacacttaaaatatggtagatagtttagaaaaatcaaatcaaaaatgttttctcactggctttttcagataaagaagttggaccacaaaccaacacatctgtgtgaaaacagccaccaatttgagtccccccagcccctcaaaaaggaacaatgccaccagtccctcacaatgaccataacgtctctggccaggactgcgatttctagcgcgtgtcttcacattctatctctggggaagcaagacaaacaggctctacccatttccctcctnttntcncnncnnncnnnnncctaagatcctctgaattnncnnnnngccgaaan

SEQ ID NO: 496 - DNA, 1784 bp, Homo sapiens
  modified_base (6)..(11): a, c, g, or t
  modified_base (295)..(296): a, c, g, or t
  modified_base (605)..(605): a, c, g, or t
  modified_base (656)..(656): a, c, g, or t
  modified_base (849)..(849): a, c, g, or t
  modified_base (930)..(930): a, c, g, or t
  modified_base (1007)..(1007): a, c, g, or t
  modified_base (1058)..(1058): a, c, g, or t
  modified_base (1185)..(1185): a, c, g, or t
  modified_base (1267)..(1267): a, c, g, or t
  modified_base (1317)..(1317): a, c, g, or t
  modified_base (1413)..(1414): a, c, g, or t
  modified_base (1595)..(1596): a, c, g, or t
  modified_base (1599)..(1599): a, c, g, or t
  modified_base (1601)..(1601): a, c, g, or t
  modified_base (1603)..(1603): a, c, g, or t
  modified_base (1607)..(1607): a, c, g, or t
agcggnnnnnnttttttttttttttttttttttgttaaaatatcttttaattttaccggcaaaatacatcaatgactaatatattcccgtatggaatatattcttattggaatatattcttatatagaatatatagactatgtatatatacatatgtgtatatacctatatacatatatatatcttggagatataaaactaattgggaataatgtcatatatatagatagtaagcaaacattttttaaaacattttaaagactccaaactattcatttctatccacctataaaannctagcaattaaacctgtcaaatcacagccatcttgctttacgcagattcagaaacatgagatccttttacctttgaaactctagtttcaaagctgttctaaagtgacttggttttaatttatatacttgcagggataagaagtagctgtagggccataaaaatgtaaagaatacagtatcgtgcccatacacaactgcaaacacttatttttaagtgttcgtaaaagatagtggtcttcagaaacaccccttttcagattggcaaactttcagagttcaaaagtgcatgtattacacttttatccccancaagctagtagctaccctctaaagcagaggttaacattttctttttccaanccacagaatggattatgatcccatgtgcatactcccatggttcccttccccaagttgtatgaaaaaataaagcaaataattctgaggttttaggggtagtggtatagggatagtattcacacacaaaaaaactgaagtacaaggatatgagacttttgttaaaatatcttttaaagtaattttactggcaaantacataaatgattaaccagttttaaaatagtaaacttatttatttatttatttttgagacggggtttcactctctcaccanggctggagtgcagtggcatgatcttggctcactgcaacctccgcctcctgggttcaagcgattctcctgcctcagcntcccgagtagctgggactacaggcgcacaccaccacacccagctaattttngtatttttagtacagacagggtttcaccatgttggccaggatggtcttgatctcttaattttgtgatctgccagcctcggcctcccaaagtgctgggattacaggtgtgagccaccatgccctgtcnaaaatattaaacttactaatacattgtaatttttagtacttctataattactgcttcataaaaaagtggatttttccagctntccagttcagatgctattaacaggtaatcagatagcactgactaagtagnaatagattaagagtaatacctaaatttaatgtattttagcatattgaaatgagtatcatcagtgtatatttcatttatcactttgtctacactttnntaggtggccttaatgcttgtcattgacaaatgttaactttcctcacaaaacctacactattcacttttttccagtatttttaccttccttattaaaaatgtttctaccatcaagaatttaaaatagaatcatgacattgcaatccaaacactaccttggcttgccagattagtctacgtgnnacncntnggtntaaagctataattccaacttccagcaaagaagtatctctgaatttgacatttctatgggaataaatgtgaactgtctcacatttaaccattaagaatttactcatacgtcatcatgataacctaatgttagactgagaatcactgctctagtgtggctccagaagctgtcagtcagg

SEQ ID NO: 497 - DNA, 706 bp, Homo sapiens
  modified_base (123)..(126): a, c, g, or t
  modified_base (213)..(213): a, c, g, or t
  modified_base (307)..(307): a, c, g, or t
  modified_base (518)..(518): a, c, g, or t
  modified_base (564)..(564): a, c, g, or t
  modified_base (568)..(568): a, c, g, or t
  modified_base (684)..(684): a, c, g, or t
  modified_base (696)..(696): a, c, g, or t
  modified_base (700)..(700): a, c, g, or t
ttttttttttttttttttttttaatttttaataacaatttatttccctttaaaaagatcaaatgtttttctcataatatattattttacaacaacaaagaaaaagaaagagagaaggaaagannnncctgaagagaaagaaataaccagattttagctcaaagagtatagcctgggattaattttttaagatttgtttgtcaatttcaaaaantcagcagtggaataaagagcttaatacaggtatgcaaaaaggaagccctcgagatgttttcaccaggatgaaatgggattagctttgtagttcntataatcttcttcacagaagaatgcaatttcagtttcactggcgattccagctgctttcagagtgctgtcttctttcagcaggagtctttcgtcatcttccaaactcaacacaagttcatttgtctttgatttatgtgcttgatgaataatctttagtgcatcatatttataatttctgaatggtggtggcaggttggtccttaaaggganatcttgctttagaaatacgataaattcctttacagtttggtccaanattnactccgtgatacactacaggtttgaaattgcgatgttcaaaggaacggatgaggcgaactgtgatggtcacttctccaggagccatgtgaagaaattcctgttcccggcgtccccntcggctactccnggcntttgcc

SEQ ID NO: 498 - DNA, 7659 bp, Homo sapiens
  modified_base (518)..(518): a, c, g, or t
  modified_base (656)..(661): a, c, g, or t
  modified_base (1026)..(1026): a, c, g, or t
  modified_base (1102)..(1102): a, c, g, or t
  modified_base (1179)..(1179): a, c, g, or t
  modified_base (1282)..(1282): a, c, g, or t
  modified_base (1342)..(1343): a, c, g, or t
gtatttgttgtgaaatttgtaagcgaataccattttcccacaggaaccagttatgacatgattccgaatttaatacgactcattatagggattttggccctggagcccaagaattcggcacgagggtgggtgtcactacagacatgttctggcgtgttctccgagggatggagcatcctgttatatatttgacttcaaattgagatgttggcttcattttttttttttacccaattaatctcccaatccctagcaactgtgactctgtatttagcacaagagaaagctgagaatgtgggtcttgcctccttccagaaatatgtctggctcatcaggacatttttttaaaacttcaaaatatttttaagatattttaaacttttataaaaaaaaaatcaaccaacaagagacttttctgaggaggaacatttgtatttgaacaagatccttggtgtgtagttcagtcttgcagtatacaagcttttgtgtataaatgttttatgatatgattccctgtnttttgcaggggtttttttctcttttgctttttagataaatatgtatatcaatattttaaattcatctttgctttttttagaggagtttgtaatcaccttataacatgaaaataaacatttcctttttaacatccaaannnnnngggttgtgttctggtgaggtatttccccctcaacgtttgccaaacgctttacattttataaagggcttcccgtccaatcccaggacgctcctcaaaggtaggtattttcccaggttagaggttcccacatggaggctcacagaggaagcagcttgctcactcaggggtacacagcaagtccatgaaagaacctggattcgcacccgggcccatgagctcttggctctactggctctactgattctacctgctacatgcccagccctgtacagctgggagatctggcagcagtcacctgagcctcagtttccccatctggaataaaccattgtccccatcaaggccaccaggatgattggaggtgntgctcttggccttaggtgctcacctgctgcggctttcagtccctcctctttagccttgggctgacctgccagaagngcagaaagcgggtggcggagtgggggaaagggtagagggggagcaaacctgattgcccttctcccactcccccaccntcaggtgcaggcgctcattaatacccagttaggggctctctggggtcacaacaggtccatgtttggggcagccttcctgccaacagcgccccccaccctttgngatggacaaactcgggagtcagttgagccctttgcccaactaaccagacaaaattctcannaactcatttatagacaatgttagaatagaagaccaccctacccccattttctggctctttctgacagcctctgcctacctccctccctctctctatgtgtactggccatgtggcttgtgttcaagccctggttccatcccttactacctgtgtggccttgggcaagttactcaacctctctgtgcctgtttcctcatctgtaatgatgggacaggaatagagcccacctccaaaggctcttgggaggatccagcaagctcttgcaaagcgcttagagcaaggcctgctgcctcccttggccttccccctgcctacaccactcccaagacagagtactcgcttcctggaaagaagctcttcctctgctcacagaactgtggcctccccagtggggcctggccctggcctctgggtcccagaccctgtagctcacctgccctagacactctctggacactccagggcagcagccagacccgaggctgccctcctgccactaccttcccaacctgggctaaagagactccatatgcaggcaccactgcctgcctctggctttctgctgcgcagagaatcaaatttgctccccctacccaagccttcacgactgattcctgctacctccaacctagtctccagccccattcccctcccaggccttctttctcttccttgagaccgtcaaactcgttcctatctcagggcctttgcactagctgtgcccgctgcctgagacactcttcctccaggtctccatggaggctggctcctgtcttcaggtctcattgcaaatgtcgcctcttgagagaaacccctcctaatattgtgagctaaagcccctcaccctggtccctctatcccgttactcccttgttttctttgttgcacttgatgccttttgaaataattatttatttgcttacttgttgattgtctgcctgccaccagaatgtgcagacatgacctaaatctgtctgattcatgttgcccaggggctggatgatggaagcaaatggcaaactttttgaattaatgaatcatcaaaagcaggtgagatgtcaccagacccatacagaagctgactcttgccaatccatgatttttttaaaaagcaaacttctactctaggtggatttaaataattttattttaaaaaatcatccccatggcacctacccccaagccactgcaacccctggtgggacaaagacttagacgagggccccaaacagaccataagcggcctttgcaatacagccccttgtgcttcccgagagccctaagaaaacccgatgtagaaaaatactttacaaggaatgtgttctaatctcagccagagaaaaatacagctttgggggagagggcaggtggaaggggacatgtcacaggggctgttcccaaaatgcataggcaggcagggcgctcactggggaaaggtgtcaggaaatttcaagtcggggatgaaccatccccatgagaagccagaagaaatattgcatatgaggaggccggcatggctgggaggcccaccgcgggcctgattgcatacttttgggagaatggcagaggcctcagcccgaggagggaggggggtattagttagagtcgggtgcatcttccctcgcctggagtcctggagtcaatgcagttttcccaagccgagaggccctgagagtgtgtcctgtccagccctgttgcttagcagaggtccagagaggctgagccacctgtccaaggtcacacagctatggctgcttgcatccagaagccacacctctgctgtgctgtccctcaccctcaaaagtgagggctcttggctttcacttggtgccctgtgacaggtagacagtgccctttcactctgggctgagtacacgggaatccaagatagcagaggcgctgagcaccccaggcacaagcatgcagggccctcagggagggcaccaaggggcagagcccagcgaagtggaggggaggggtaagggaggcaggcctccaggagacagcgtgggcaggtccccaagggggccttggtgggtcggcagagatggttccggccctgaccaggaggcctgtgtctgctcagactgtccacccgtgatcgtccagaggggctgggggtccaacccagacagggtcacacagcaaacaggtaacagacccagggtgaaaagaacagacctcttgactcctcatctgttccctcaaatggaagagcacttttctggcctccagggaccccaggttggagacagatggaggtgggagtgggtgccccgttttcctgagacccctgtgagaactgggccaggcaaagcacatccccagccctggctacacctgcccgcccactccatcccaggcaccactcactagaccaccaggggaggcccacacccttctcaaaatgaagagggtctctgatttgtggacactgaggacaatgattttaagggatgctggtgcttccagatttcaagtgggaatagacttctttgaataagcactttggacaccctccactgggcaagagtgtcccatctttttctctggcccatttctctcccatctccctccctctttctcctcttcctccactgatctggctgtaaagaggagcgctaccgcctcacaggtcctgcgtccatcgcttttcaattttcactggatggcaggtgaatggaagctccagggtcttttgccccaaaatgacccctcccacatggaggggcttgggctgagcggacgtgcagatgggtcagtggccacacggcctacagaagaagcaggagggctgagagcccaaggcccatagagcctgcccaatgggcccagaaccacagtctcaagtcccagaagcttcagactgagatgctgaaatcaaagaatcacccactttcagaatcaaagggccagcacttcctgggatcccagacgccccaacttaagagtctcataagtggggaccagattctgggaatctcagaatctcaggactagcaagccccaaacccctattctggagaagcgaaggagctgggctcccatccgaagcagcatccttcctggtggccgagtctctagatgaagtggctccccatcaggaagccaacccccaagcgcgtgtgcacgcatcatgggaatgcctcataccccaatgcatgactgcgctggggtatccagctcctgcctgctcacctcctgtgaccgagaactcactcctccttgcagctcattccagctccatggctttgctgggaggaagtgctccctacatcttcgacctctccaaggaggccccacagagacctgggacagcccccaggcctctctcctctcggctgagcagcctgtgccaacccttcttaagggaggctcctctgggcatcttggagacccaacttggcgagagaccccagctgtcactccaactagggcaggacctccctgcctggcaccccagtcaccacagacctggggaacagagaccaagcatcatcccaggctcagagtctgccagaccaacagatgaatgagtgggtggccgcttctccagcccagctacgtgtctgggagccaggatctgcctgggtggccccttaggagttcggcccacatgctgacttcagagcatccggggactgctggggcctggcgatcggggggcccggctgctgtgtgccgtgtgcggcttgcggctgatgatcagctccaagacatcacccgcctcggccaggagtggcaccgccaggcagcagtcgaagtcccgtgtacggacgtggttgacctgcaggaccctgtcgaagggctggaggcctccacggtgggctggcccatcagggcgcacagtgtggacatagacacctttttccaggaggccatctgagacgctgaaaccaaagtcatgccgcatggggtccttgtgcagggtcaccttgtgcatctccaagggtgtaggcagcaacagctcctccatttctgcaggagaggctcgtacctcccggcccctctgccaaggccggtggccaggcctgccctcgagggccaccctctgcacggtgcccgtcatgatggatgcctccagttccctcagcagctctgactgaccacatgactccaggtcttcgagagcttctccaaacatgcgccagaagccctcctctcgggcagggccaggggctgggctcgttggcggctcccaatcatccccctcctcctcctctggaaagctctcgtcagctggggttggggtatagctcgtcctccggggctcggtgggtggggggctgcccctcagccagccaggcctccgctcctggggggtcgtgccccgggctgctgcctgtggtgtataggaccctgggcccccaaagccaccctcggtggccgagctgtcccaagactccacagcactgtccacactgggcacagccggcgagaagcgggctgctggcaggcctcctttcagggcatctgctgggtcctcatcagcatcactggtctcactgaggctgcccgacttgcggggtaggaggggacggtctagttgcttcttgatcttcagtgtgacggtctctccagccacctgcaggaggtggatggcctcgctcagcggccggcccttgaggctaacgttgttgatggccagaatgcggtcccccacgtggatggcaccagtcctctcagccaggccacgcttggtgaggcctgagatgacaatggggtcaaaaggttcctccgtgcccgaaatggtgatgcccaggggacccccgtagcgcttcagctccactgtgtagctgacggcacctgtggtctccagctcatcagagttgtcctcgtccttccggatcttcagcttcaccaggtcctcgcactgccgcaggatttgcacggcgtcctccatggggcagttgtccaggcggatattgtcaatggccagtagcttgtcgcctggctccagggtgcccgtcctgtgtgccacgctgcctttcttgatgtcggagatgatcaagggctcccctcgtttcctgctggccgagctgatggtgatgcccagctccacgctgcgcttcttgggcagcttcacgtggaaggtgccactgcttgggatgacggactccgccacatcgaactccacctccagcacgaccttgtgggccagcgcggcgtcccgcaggagctggttggcttcctccatagtcccgtcctcggtggcaatgccattgatggacaggacacggtcccccacctgcagcagcccacacctctcagccgggctgtcaggctcgatgaagcacacgaggggtggggaggacagggtctcggtggcgaagatgccgccctggagctggaggccaaagccgctgagggggtctccacagagcacgacctccgtggtctccgtgtgcacaatctgcccgcccggccccaccgtgctggaggctagcgacaacgagctcttgtgttcccttcttcgctgcctcctccgccccattgtagttcgaggactcatgggctgggatccacggggaagggtgctggggttgttgcaggaaaaggcgtggttcaaggtcggcgaggaaaagggagttgaagacaaggatcggctttggtcctggccagcaggtgtggcccaggtgggcatcctgcagtggccgggccgggggctgtggcaggagggcacgcaggggtcccagcggtgcagctgctcactcctctgcactttcactgcctctgagggcctcagtggccgctgactctggggcacaggcaggatctccagccgcaccttctctgaaatgctggccaggagcttggtggcctcaagcagcgagcagtgttccatgctggtgccatcgatggacaggatgtggtctccagggtgcagggctccgctcctgtccaccacgctggctggcttgatgcggtcgatggtaatgactgacttgttccggagggaggtggtggtgagcgagatccccagggcagaccctggcgtcttgactatttccaccatcaagggtcccgaagcattagccaccgtgtcaggggtggccacatcatactccacctgaaagagtgcctcgtggctgcactgccgcagggtggccagggcggtggcatggctggccccgtgcagcgggattccatcgacgctgagcagcctgtcgcccaccttcagggagccctccctgtcggcagggccaccgggccgcacgtaggtcaggacaagcgggcgggacttgtgcccatcttcatgggcacctcctctaaggacaaagccaaagctattgccctccttgtagagggagacgtc

SEQ ID NO: 499 - DNA, 860 bp, Homo sapiens
  modified_base (799)..(803): a, c, g, or t
  modified_base (805)..(807): a, c, g, or t
  modified_base (809)..(810): a, c, g, or t
  modified_base (812)..(812): a, c, g, or t
  modified_base (851)..(852): a, c, g, or t
ttttgttcaaaaactttatttgccttctgctcattataattacatataatcttcaaggagtttaaatgacaaccaaatccaaggcctggcccccaagaacacagtgataggattcagcatttggtgtttctaattatacaatgactacatatatatcatagacttgctctcatccattctccaccataaagtttcaatttcctcttaaaatatggcagtcaagtttagtctcattcaaaatcttatctggtcctacagcatattacagacttagactcactcttctgttttaattgatgttactgtgtagccgaagattttaaaaaaagatttatagatatacacttgaaattctgcagtcttgaaatactacaataaatttttcttacttatgaaaagccaacaacaacaaaaaaggccaggccaggcataagacagaggggaagggaagatgaggagggaggtttgagagtcccatcattttgccttgctgaaactgggtttcagtagaaatatttggcaagaatagtgtggaaaaggaggatggagaaagaggttactctgattttatgtaataattcagtttcaaaacatactgatatcaacctccaaaaatagtagttcacatctgcaatacaaataggcacacacggtaaagatggttaaaaagtagaatttaaaaggctatttgtccatcttcaggacattttgcaggcggccccaccctccccacatgtcctgtatttacattttactcttcagaaaagccccttttaaaagaatgctatttcttcctccnnnnntnnngnntntttttgttttgtattgttttgttttgttttgtttttaannagcaatta

SEQ ID NO: 500 - DNA, 1195 bp, Homo sapiens
  modified_base (149)..(153): a, c, g, or t
  modified_base (228)..(228): a, c, g, or t
  modified_base (623)..(623): a, c, g, or t
  modified_base (983)..(983): a, c, g, or t
  modified_base (999)..(999): a, c, g, or t
  modified_base (1004)..(1004): a, c, g, or t
  modified_base (1034)..(1034): a, c, g, or t
gctttagactattttccttcagttctctgcagtcgcagtgaaatacttcaagcgcaatttttgctgaactcttcttttcagcagtggaaaagctgcggaaatggaaacttacccccaacatatttcaatttggaagttcaacttcaaannnnnttcataaaaatgtaagttttattgagtgcctatagtgtgcatgggcctttattagacacgccaaattcaggcacnacagacacaagatccctggcctcaggtaccttatgatctaattaatagatattagaaacagtagaaagacaagttacacgtcaatgcccaatgactagagtcaacattaaagagttgtaatttaagtaatccaaactgacatctaattccaaaatcatttataaaatgtatttggctttggaatccacaggacttcaaacaagcaaagtttcactgcagatagtcacaaagatgcagatacactgaaatacttaagagccttattaatgatttttgttattttggatcttctgtttttttcttattatggtccgaagcctccttaataccaatttatcagacagaagcatgtcatcttgttgttcaagataatccagtaaattttcagtccattncaagtgccgctttatggctaatatgcttctctggattcagttctgtttttctactcttactggaaggcttttgctcagcagccttggtctggtcctcagcactttcactgtcagtcagcacctgacagcttgagtcactgctccgagagtcgaaccactgatcaatattctcaatgtcaacatgttcacattcttctgtgttctgtaaaactgttgctaaattagctgctaaaatggctccttcatcaatgttcatacctgaattctcttcattgccagggaaaagttttttccatgctttggttatggtacttgattttaccatgttccaagctcttgacacttcataaattgcatccnaacactgtcaagttcnttccnaaaatatttttgggtcatttccttcatccnatgtatttctggagaagtcctgctcgatagtatctttttacagtggctagaactccctggctcattggttgaatcagacttgtgacatttggtggcaaatacttcacaattattctgccatcatctgaactcaacatttcttcatttggacgtgctggggg

SEQ ID NO: 501 - DNA, 2123 bp, Homo sapiens
  modified_base (1778)..(1780): a, c, g, or t
  modified_base (1784)..(1784): a, c, g, or t
  modified_base (1786)..(1789): a, c, g, or t
  modified_base (1791)..(1792): a, c, g, or t
  modified_base (1794)..(1795): a, c, g, or t
  modified_base (1797)..(1800): a, c, g, or t
  modified_base (1802)..(1809): a, c, g, or t
  modified_base (1811)..(1812): a, c, g, or t
  modified_base (1814)..(1814): a, c, g, or t
  modified_base (1816)..(1819): a, c, g, or t
  modified_base (1821)..(1821): a, c, g, or t
ttatagttattcttttccttatgaaaaacaaaaaggggactgggcgtggtggctaacacctgtaatcccagcacttggggaggctgaggcgggcagatcacaaggtcaggagttcgagaccagactggccaaaaggatgaaaccccatcactctactaaaaatacaaaaaattagccaggtgcggtggggcgcaccagtaatcccaactactagggaggctgaggtaggagaatagcttgaacccgggaggcggaggttgcagtgagccaagatcgagccacggcactctagcccaggtgacagtgtgagactctgtctcagaaaaaaaaaagaaaaacgggatcgagatggtttgcaggattagcaagtgatagagatatattgaagacatagaaagccagtgtggttgctcacacctataatcccagcactgtgggaggccaaggcaggaggatcacttgagtcaatgagttagagaccaacctgggcagcaaagtgagaccccatctctacaaaaaaattttttaaaaatcagccaggtacggtggtgcacacctgtaatcccagctactaaggaggctgaggtaggagaatctcttgaacccgggaggcagaggttgcagtgagccaagatcgagccacggcactctagcccaggtgacagtgtgagactccatctcagaacaaaaagaataacaggatagggatggtttgcaggattatcaagtgatacagatgtactgaagacacagaaagccagtgtggttgctcacatctataatcccaacactttgggaggccagggcaggaggatcacttgagttgacgagttagagaccaacctgggcaacaaagtgagacccccacctctacaaaacattaaaaaaaaatgagctgcacatgttggcacgcacttgtaatcccagctacttgggaggctgaggtgagaggatcacttgagcacaggaggttacagtgagctatgatcacgccactcgacaccagcctgaatgacagagcgagaccctgtctcaaaaaagtggggggaaataaaaggatatagtgcactggattgaaactttctcctgtcgttatcataagcagaagaattgaagtaactaaaaagagaatcatagtctcaatgtgtgcttgaatgttatttaacatcacgtctctgctacctcatcattaaccagctgtggtaatgattccacactttgaacccatcccacctgttgacagaagcgattgcaatgccagcatcactcagtgacggctcatcatgtagggcccagaatactgattttgtgacttctaagcttgtgctccattcccaacacaaagtcttctgaccagcctttgagtaccattattgtagaggaagctcatcttaggtaactattactagagcagaaatcacttaatataaaatatttcatgtatcaaatttaaaactcacttttgggttcattgatgtagtaactcaaccaggaaacttaaatggaattagtgttttcactgacaataatgatgctgctttttcattataggcccataagatggcctggcctttccttgaaccagtagaccctaatgatgcaccagattattatggtgttattaaggaacctatggaccttgccaccatggaagaaagagtacaaagacgatattatgaaaagctgacggaatttgtggcagatatgaccaaaatttttgataactgtcgttactacaatccaagcgactccccattttaccagtgtgcagaagttcnnnaatnannnntnntnnannnntnnnnnnnntnnanannnngnaggtctcataacaacaaactgcagtctacagcttcttaaagttcagcgtgttaacctaacataaaacacagcaagaatctggttgtctgaactattttaaattaaggagccagatgtttttagtcaggctatcctgacaagacttgacctaaacttcgtttttattggccataacagtccaattatattcttggccaattttgtccaacggacaagaaaaaagcaaagtcaacgacaccattatcttgtcaagatcagatggttttactattgtggcagaagcgagaaaactttgtttgttg

SEQ ID NO: 502 - DNA, 2111 bp, Homo sapiens
  modified_base (333)..(333): a, c, g, or t
  modified_base (905)..(905): a, c, g, or t
  modified_base (935)..(935): a, c, g, or t
  modified_base (955)..(955): a, c, g, or t
  modified_base (1509)..(1509): a, c, g, or t
  modified_base (1581)..(1581): a, c, g, or t
gagggctcgaggtgccacggcgtccaggagcgaggacagggccagctacaaaagaccccacagctgtagagagagcaaacttgttaaacatggctaaactgagtatcaaaggactcattgaatctgctctgagctttggccgcactttggattctgactatccccccttgcagcaattctttgttgttatggaacattgcctgaaacacggtcttaaagtaagaaaatcatttttgagttacaacaaaaccatctggggccctttggaactggtggagaagctgtaccccgaagcagaggaaataggagctagtgtccgggatctacctggtnctgaagacccctctgggtcgagcaagagcgtggcttcgattagccctcatgcaaaaaaaaatggccgattacttacgttgcttaattattcagagggatctcttgagtgagttttatgagtatcacgcactaatgatggaagaagaaggagcagtaattgttgggctgctggttggcctgaatgtgatcgatgctaatctgtgtgtgaagggagaggatttagactcacaagttggagtgattgatttttctatgtatttaaagaatgaagaagatattggaaataaagaaaggaatgttcaaattgctgccatattagaccaaaagaattatgttgaagaattaaatagacaactgaacagcacagtcagcagcctccattcaagagttgattcattagaaaagtcaaatactaagctgattgaagagttagcaatagcaaagaataacatcattaaactccaggaagaaaatcatcaattacgaagtgaaaataaattgattttaatgaaaacacagcagcacctagaggttaccaaagtagatgtggaaactgagcttcaaacatatangcattctcgtcaggggctagatgaaatgtncaatgaagccagaaggcagnttcgagatgaatctcagttacgacaggatgtagagaatgagctagcagtacaagttagtatgaagcatgagattgaacttgccatgaagttgctggagaaagatatccatgagaaacaagatactctgataggccttcgacaacaactagaggaagttaaagcaattaacatagagatgtatcaaaagttgcagggttctgaagatggcttgaaagaaaaaaatgaaataattgcccgactagaagaaaaaaccaataaaattactgcagccatgaggcagctggaacaaagattgcagcaagcagagaaggcgcaaatggaagctgaagatgaggatgagaaatatctacaagaatgtctcagtaaatctgatagtctgcagaaacaaatctcccaaaaggagaaacagctggtgcaactggaaactgacttgaagattgagaaggaatggaggcagactttgcaggaagatcttcaaaaggagaaagatgccttatctcatcttagaaatgagactcaacaaatcattagtcttaaaaaagagttccttaanctccaggatgaaaatcagcagttgaaaaaaatatatcatgaacaagagcaagctcttcaagaactcggcaanaagcttagcgaatcaaaacttaaaattgaagacataaaagaagccaacaaagcattgcagggactggtttggctgaaagacaaagaagcaacacattgtaaactttgtgaaaaggaattctcactctctaagagaaagcaccactgtagaaattgtggggaaattttctgtaatgcctgctctgacaacgaactacctttgccttcttcaccaaaaccagtacgggtttgtgattcctgtcatgcattgctcattcagagatgctcatctaacttgccctgagactccagaactaaatccttatgtatgaaattacctacaatgaatgttatgatgttgtatacaaagacatggcagctactgcatcttcatgtgtcacaaactctacatctgcttctcctgtggctctgccatcagctccaatatcaatatgaactcgtattggatttagtggtgagaagaactaaataaaaggaaacacttatttacttttctattgagaatattaaagtaaattaccacataccttg

SEQ ID NO: 503 - DNA, 1105 bp, Homo sapiens
  modified_base (8)..(10): a, c, g, or t
  modified_base (12)..(12): a, c, g, or t
  modified_base (36)..(36): a, c, g, or t
  modified_base (325)..(325): a, c, g, or t
  modified_base (811)..(815): a, c, g, or t
  modified_base (820)..(821): a, c, g, or t
  modified_base (823)..(823): a, c, g, or t
  modified_base (897)..(897): a, c, g, or t
  modified_base (958)..(958): a, c, g, or t
  modified_base (960)..(961): a, c, g, or t
tctctccnnntnacagtgaaacacttttatgaaggntgcctgagaggtaatctactgacttggagagtatgttcaagggatcatataggaaagtcatgggctcttccccacgcaaccatctccagagacctaaataaaaagcaaatttaatacgaataagtggacagatgagctgcccagtaggcaggcactgagagactgatcagtgggatactcaagcagagtgagacagagcggaaccttccaagtggtattagtgttgacctggattacatcccataatgagttctggatccagaattacctgagggaaggggtctgttancagtgccataaagggtcagtggctctgatctcccaggcgtcagggtcccttgcagagatgactgagaaccaagtgcacaaagcacagatgaagctgctacaggctggaaccccaggggccactggaatgtccatttcctgcagcctgcctatactgaggtttaatctagataacgtttgacaaaagggtcagggtaagattaggagatgataattaacctctaggagtctacctcattgtacagctgctcccccactgggtactcccattcttctaagaccaagggctgccagtgggacccacactgctctgcatcaagcttccagaccactgcccaccctcccttcctcaaaaggctctcacctgggagatgctatcctgtcatgcctgctttcccctctggcaggtgccactggccttgtggccactcctcttgttcaccaaggatgctgactcctaggtcacaccattctcctcaacatctgnnnnnttctnncntcagcacccatgtggaggctcaccctgccctccagcctcgccaaccctagatttcacttcttaaggctcctccntggctctggccagcaaccccaggtcataccctctattttgcctttacctgagattgctccncnnctcaatttccaaagcactcctgtctggctcaaatatacctccctgcccaacccctcaccatgctggagtttctatcttgtcaagacctctaatttcctaatccctccctagtcacctcctgttttcaattccaatttcttggtc

SEQ ID NO: 504 - DNA, 665 bp, Homo sapiens
  modified_base (470)..(470): a, c, g, or t
  modified_base (536)..(538): a, c, g, or t
  modified_base (540)..(545): a, c, g, or t
  modified_base (547)..(553): a, c, g, or t
  modified_base (558)..(560): a, c, g, or t
  modified_base (562)..(564): a, c, g, or t
  modified_base (566)..(572): a, c, g, or t
tgaattattggcaaatatataacatattttgtttctccagtcttcatttctcctttttttctgctgtacatctcccaaaggtcataaatcatacaccaacaaacaaaaagtttcttacatatatacacctgtcaccacagttcagctttccattcctattcctgatctatattcttctcctatgtttcagataactgactccacacaacaaattatgtgtccattgttttcttgatttctttttaacaaatgctaaactataaagtcatctgcacttttgtaagtattttaacaaggccaatacattccaggtatttaagaagccacaggagaaatctagggtcctttggcttgttgctttacattgaatttacctacatgtggaaaaccactaatctggatccctacttcaaactaatttttgcctcctagaaaggcagtacgtaattcttaaaatataaagatcaaanttaaatcaaatcatacttgacttgcattccagctgtgctctttgacttgtcaaagtctcaatttcnnnannnnnnannnnnnnatggnnnannntnnnnnnnatgcctggaaatggatgcgagaaagactgagtccccatggatggctcatgccaaatcaaacagtactaaaaacctcagacacctgatgtggcc

SEQ ID NO: 505 - DNA, 682 bp, Homo sapiens
  modified_base (37)..(38): a, c, g, or t
  modified_base (40)..(40): a, c, g, or t
  modified_base (477)..(477): a, c, g, or t
tttttttttttttttgagatggagtctcgctctgtcnncnaggctggagtgcagtgatgtgatctcggctcactgtaacctccgcctcccgggttcaagcgattctcctgcctcagcctcccaagtagctgagattacaggcgagtgccaccacgcccagccaatttttgtattttagtagagatggggttttaccatgttggtcaggctggtctcaaactcctgacctcgtgatctgcccacctcggcctcccaaagtgctgggattacaggtgtgagccactgcgcccggatgaaatacaagagatttttaaagaagttttcaaactattcaggttacagacacaaatttatagaattaaggagatttatagtgtacatcaaagttcatagcttatttatttgcaattttgtggttcgtaaactaatgaagaattatactaaatgacctatatagtctcttttagctataaactntcaattatattattctgctttaaaataattaagaccatatctcaaagttgtttaagtagataatgtcggccctgaattaaggatttttttttcatcccctttctggcttttagtccttcctagtcagttattaatggggaataaatattacacattttactcaactgattcttaattcctagctctattgccccctcctctcctc

SEQ ID NO: 506 - DNA, 714 bp, Homo sapiens
  modified_base (533)..(537): a, c, g, or t
  modified_base (541)..(549): a, c, g, or t
  modified_base (551)..(554): a, c, g, or t
  modified_base (652)..(653): a, c, g, or t
  modified_base (655)..(656): a, c, g, or t
  modified_base (658)..(660): a, c, g, or t
  modified_base (662)..(667): a, c, g, or t
  modified_base (669)..(677): a, c, g, or t
  modified_base (679)..(681): a, c, g, or t
acttcccaaaaccccaccttctttttttttgggcaggttttggggtggcctcccactttggcgtcctaacagacctgccgtgtgttggggtggccaagaaacttctgcaggtggatgggctggagaacaacgccctgcacaaggagaagatccgactcctgcagactcgaggagactcattccctctgctgggagactctgggactgtcctgggaatggctgacatctgctcccgagagcacatccgcaagtcgctgggactccccgggccacccacaccgaggagcccgaaggcgcagaggccagtggcatgccccaaaggagactccggagagtcctcaggtggagcacccagtccccaaagacaggctgaccgcaccaccccagggggacgccgcagcacagcccagcaccaggtggggcagaggtgaccacggcccctctttgctccgtcatcggctggtcagctgtggtcacggtgcctcagaggacagatctctatgggggcaagtgccagatcctgagagcgcatnnnnngctnnnnnnnnncnnnngaaggggactcggagctgcagcctgcacgacccctgcagcctgtgctttgcccacccctttcaatagatggaacttgcttgctcttttttaaaaaaannannannnannnnnnannnnnnnnnannnaaaaaaaaaaaaaaaaaaaaaagtcgtatcgat

SEQ ID NO: 507 - DNA, 462 bp, Homo sapiens
ttttttaaaaagatgtataagactgtacagaaaacattgtaaaatttagagaagctaaagaagtgcagtcctatgctacacagatggaagggaagaatatcctacacaggtaattgggtatggcaagcaaggctagaactgaggaaaaacagaatcaggcccagcctaaaagcagcacactactgacatatggaaatgtagatttccattccacaaatcttactatgtttctaagagaaactagaagtccagatttctatggaaattcttttttcttttttatgtactggcagaaacaattttaaataccacacaggacaaaaaagaacacatctgtggaagaatttggccccgagccaccagttttctactcctgcaatctacctacttatctttagataattcattaatatttctgggttgtgcttaacctacacacgcaaaaggttacacacactacag

SEQ ID NO: 508 - DNA, 789 bp, Homo sapiens
  modified_base (53)..(53): a, c, g, or t
  modified_base (533)..(533): a, c, g, or t
  modified_base (627)..(627): a, c, g, or t
  modified_base (629)..(631): a, c, g, or t
  modified_base (669)..(669): a, c, g, or t
  modified_base (672)..(672): a, c, g, or t
ctttttttgttacaaaataaaacaaaagcatttatgtaattcagaaaaaaaancatgaattttcactccaaagacatagcacagaaaagcttacttacaattaccaacaccacactattgtacctttaaatatgcaaaggtaaagagactcaaagttgcattttaccatttttaatctctccaaattagacaagcaatctaaaagaagatgtcacacattcctgtttaatgcatttgctgaaatctttcagactttaaaaactttaggtaaaagcaatggcaacttgaagtttcttttccaatcatatttaagttagccattaaatgctgaattaacaattaatccatacaataatataaaaatacacatattaaatcacattgtttttcattattgaagcttaataaaaatatcattttaatataaccattttgaagaactcaaatggctgaacttattatagtgtctaaattataccatcaatagaaacattacattttccccccagttggtgaaaatgagctcatgcaangtatttctgacactcacagtgacacatatggtctgccattctaaagatgtacaagcagctctcacttttaaacatgacaatatgattcagaatnannnagcatttgttaaaaataccagctttcacatgtttcatnaanctctaaaccaaaataataattttgatgtgtttcaggtatcagacaaagcagataatttaaaaggtaaatgattctactagtgcagactagttatcactgtggctaattttaaaacga

SEQ ID NO: 509 - DNA, 451 bp, Homo sapiens
  modified_base (4)..(6): a, c, g, or t
  modified_base (9)..(9): a, c, g, or t
  modified_base (54)..(54): a, c, g, or t
  modified_base (255)..(255): a, c, g, or t
  modified_base (261)..(261): a, c, g, or t
  modified_base (280)..(280): a, c, g, or t
  modified_base (284)..(284): a, c, g, or t
  modified_base (296)..(296): a, c, g, or t
  modified_base (316)..(316): a, c, g, or t
  modified_base (329)..(331): a, c, g, or t
cttnnntanatgcacagtgcaggcagaaagtagaatgcatcttcaattgtcctntaggctgcctgtaaccttttcatgggcaacttgttctaatgccaccagccaacccatgttttagtttgctggggctacattacaaagtaccacagactggagggcttaaacaacataaacttattgtctcacagatctggaggctaaaagtgtgagattgagaggctggctggcttggttccttctgagggctgtgagggnaggatncattccagacttctctccntggnttgctgatggcntgtcttctctctctgtcttnacatcatcttccnnntgggtgtcactgtgttcaaatttcccttttatagggacaggttagtaagattagggcccacccttatgacctcgttttaacttctataatgatctagtttccaaataagttacaccctga

SEQ ID NO: 510 - DNA, 422 bp, Homo sapiens
  modified_base (13)..(14): a, c, g, or t
  modified_base (25)..(25): a, c, g, or t
  modified_base (88)..(88): a, c, g, or t
  modified_base (110)..(110): a, c, g, or t
ttttttttttttnnttctggcatangtaggggcagtatatggggttctaacctctattttattttattttatcttatattatcttatnttatttttttaccacttcccanatacccacttctttaaatgactttagttggtgctcttcttttcagtctcaccttatctctctctctctctctcctctttcttttttttttttttttcggagttttgctcttgttgcccaggctgctggagtgcaatggcacgatctcagctcaccgcagcctctgcctcctggctcaagcgattctcctgcctcagcctcccaagtagctgggcgttacaggtgtgcgccaccatgcccagctaattttgtatttttagtatagacggggtttctccatgttggacaggctggacttgaactcttggcctcc

SEQ ID NO: 511 - DNA, 501 bp, Homo sapiens
  modified_base (234)..(235): a, c, g, or t
  modified_base (237)..(238): a, c, g, or t
  modified_base (240)..(248): a, c, g, or t
  modified_base (250)..(253): a, c, g, or t
  modified_base (256)..(261): a, c, g, or t
  modified_base (264)..(265): a, c, g, or t
  modified_base (271)..(272): a, c, g, or t
  modified_base (274)..(275): a, c, g, or t
  modified_base (278)..(278): a, c, g, or t
  modified_base (282)..(282): a, c, g, or t
  modified_base (290)..(290): a, c, g, or t
  modified_base (340)..(340): a, c, g, or t
  modified_base (372)..(372): a, c, g, or t
  modified_base (387)..(387): a, c, g, or t
ttttttttttttttttttttttgactcaaaagcttgctttatttgaggacaatttcatcctgaaaaccaggagcggggtgttgcggggtgggagggcggccaagacgtctgagcagtatcccaggcaccccttccagcccagggtgacctcgaaagcagcagagagaacggggactggaggcgggtgggccctggaaatcctctcatggtgcgggtggggggggtatggggggnngnncnnnnnnnnntnnnngcnnnnnngcnnctcctnncnncangaanaggcccangtgcagcaggaaaccccgtccctggtgctcactggtgaccgtgggcagangagaggacaagtctctccacacagcagcctgnggccatggggtacantccatcttttgccaattgtcttcttttatttattctggcaaaatgcccattcccaaaggcttctgcatcctgtccatcagacaggacagtcgtgccttttcaaagtccaaggct

SEQ ID NO: 512 - DNA, 2617 bp, Homo sapiens
  modified_base (208)..(244): a, c, g, or t
  modified_base (526)..(678): a, c, g, or t
  modified_base (704)..(704): a, c, g, or t
  modified_base (741)..(741): a, c, g, or t
  modified_base (775)..(775): a, c, g, or t
  modified_base (791)..(791): a, c, g, or t
  modified_base (858)..(858): a, c, g, or t
  modified_base (864)..(864): a, c, g, or t
  modified_base (888)..(888): a, c, g, or t
  modified_base (895)..(895): a, c, g, or t
  modified_base (1087)..(1087): a, c, g, or t
  modified_base (1098)..(1125): a, c, g, or t
  modified_base (1227)..(1227): a, c, g, or t
  modified_base (1341)..(1341): a, c, g, or t
  modified_base (1382)..(1419): a, c, g, or t
  modified_base (1637)..(1637): a, c, g, or t
  modified_base (1680)..(1680): a, c, g, or t
  modified_base (1729)..(1754): a, c, g, or t
  modified_base (1837)..(1857): a, c, g, or t
  modified_base (1958)..(1959): a, c, g, or t
  modified_base (1963)..(1963): a, c, g, or t
  modified_base (1998)..(1998): a, c, g, or t
  modified_base (2031)..(2031): a, c, g, or t
  modified_base (2041)..(2041): a, c, g, or t
  modified_base (2069)..(2069): a, c, g, or t
  modified_base (2089)..(2089): a, c, g, or t
  modified_base (2095)..(2095): a, c, g, or t
  modified_base (2543)..(2543): a, c, g, or t
  modified_base (2570)..(2570): a, c, g, or t
  modified_base (2596)..(2601): a, c, g, or t
gcgggccgaggagccgggcgcaatggagcggaagaggtgggagtgcccggcgctcccgcagggctgggagagggaagaagtgcccagaaggtcggggctgtcggccggccacagggatgtcttttactatagcccgagcgggaagaagttccgcagcaagccgcagctggcgcgctacctgggcggctccatggacctgagcaccttnnnnnnnnnnnnnnnnnnnnnnnnnnnnnnnnnnnnnaacaagagccgccagcgcgtgcgctacgactcctccaaccaggtcaagggcaagcccgacctgaacacggcgctgcccgtgcgccagacggcgtccatcttcaagcagccggtgaccaagattaccaaccaccccagcaacaaggtcaagagcgacccgcagaaggcggtggaccagccgcgccagctcttctgggagaagaagctgagcggcctgaacgccttcgacattgctgaggagctggtcaagaccatggacctccccaagggcctgcagggggtnnnnnnnnnnnnnnnnnnnnnnnnnnnnnnnnnnnnnnnnnnnnnnnnnnnnnnnnnnnnnnnnnnnnnnnnnnnnnnnnnnnnnnnnnnnnnnnnnnnnnnnnnnnnnnnnnnnnnnnnnnnnnnnnnnnnnnnnnnnnnnnnnnnnnnnnnggtgaccgacgaggacatcaggaagnaggaagagctggtgcagcaggtgcggaagcggctggnggaggcgctgatggccgacatgctggcgcacgtngaggagctggcccgtnacggggaggcgccgctggacaaggcctgcgctgaggacgacgacgaggaagacgaggaggaggaggnggaggngcccgacccggacccggagatggngcacgtntagggcaggtgctgcggggccacgggggctccctggagtcgggtcctggcagtggggactgcctggtgaacacagatgtgcttgggatgacgggtgcctcccaagagcttcccatctccctagaagagcccaagcgtccccgtcccgtggagtcgctaaagccagccctccctgtcctttccagaggccctnccgagagcccnnnnnnnnnnnnnnnnnnnnnnnnnnnngcggtcctcggccccacgtgaaccaggctcggcggcgaagcccagccttggagacacccaggaggaaggccgtgctcctggctccctcctcggcccgtcccnacttcccggggcctcggggcacacagctggggctgcccccacccgaaagaccctccacgctcgtcctctacagagtccggcttcgggaagtgccgggtgctcctgggccctgcntggctccctacgacctttgggctcgaggccagctcctcccnnnnnnnnnnnnnnnnnnnnnnnnnnnnnnnnnnnnnnccagcaggtgcccggcagctcggcgccacggcttgctgacagctgggagggtttctcggtctggaggcgtagttttgaaactcacatcacccactgtgcagcgtgaggacgggactctggtctgctgtggggggcatgcaggacggcgccactctctgccctgccatgcggctggtggtgccacagagcctcaccgtgcctgagtggcgtgcccaggnaggccgctctccttcagtaaatgtaacacagtcgaggcacgtnatcgggcagccttccctgtgtgccaacgccagccttcgcttctgaaaannnnnnnnnnnnnnnnnnnnnnnnnnacttggtcgcccggcgctgccagaatgctccactgccagccggcccccctgcctcggtttcccttctgtttagtggcgacacnnnnnnnnnnnnnnnnnnnnntgctgacgctcccaggggtgccaggagccactgggacagggtgaggctcccagacgctcctcgaggtgcccagctctccagggagcttctggcccaaggcnntctngagggatctgctccttaaccccccagtgccttggngagggcaggttccaagccacagacgcctgcccngagtggactntgcggccagtccctggtgccctcctggnccctgctgcccagtgagggntcctancgggtgggttcattggcctgggcccagcgagcccccacctgcattgaccttaggcccatagagagggcctgtcccggtgctgccccagccaggatctggtcgctgccccagggggactgatgggcagagtcgcccctgtggctggactgtgaccatccctgatggggcctgaccgcgggagctgaggaagcgccgctccaccgtctgccctccaaggacccgcatggaggcagtgggctggcagcttcctgctgctccctgtcagagtcaaagcacaaatcctcaggacgggctcaagggccagggcagccgagggaagctccaggtggggaccacgtcttcctgaggttggtgcccactggctgggaccctttgcagtggggtggcctcccctctgtctgcctggtggagggagccgtgggcgtggggacgtgactgaataaagccnccatgggtggatgtgcttggaaaaaanaaaaaaaaaaaaaaaaaaaaaaaaannnnnnaaaaaaaaaaaaaaaa

SEQ ID NO: 513 - DNA, 1248 bp, Homo sapiens
  modified_base (20)..(20): a, c, g, or t
  modified_base (22)..(22): a, c, g, or t
  modified_base (24)..(27): a, c, g, or t
  modified_base (29)..(32): a, c, g, or t
  modified_base (83)..(83): a, c, g, or t
  modified_base (85)..(87): a, c, g, or t
  modified_base (516)..(516): a, c, g, or t
  modified_base (710)..(724): a, c, g, or t
  modified_base (743)..(744): a, c, g, or t
  modified_base (778)..(793): a, c, g, or t
  modified_base (875)..(875): a, c, g, or t
  modified_base (931)..(941): a, c, g, or t
  modified_base (944)..(944): a, c, g, or t
  modified_base (946)..(946): a, c, g, or t
  modified_base (948)..(952): a, c, g, or t
  modified_base (954)..(954): a, c, g, or t
  modified_base (956)..(959): a, c, g, or t
  modified_base (961)..(972): a, c, g, or t
  modified_base (975)..(977): a, c, g, or t
  modified_base (981)..(981): a, c, g, or t
  modified_base (996)..(996): a, c, g, or t
  modified_base (1018)..(1018): a, c, g, or t
  modified_base (1025)..(1025): a, c, g, or t
  modified_base (1067)..(1067): a, c, g, or t
  modified_base (1081)..(1081): a, c, g, or t
  modified_base (1093)..(1093): a, c, g, or t
  modified_base (1095)..(1095): a, c, g, or t
  modified_base (1109)..(1109): a, c, g, or t
  modified_base (1112)..(1113): a, c, g, or t
  modified_base (1115)..(1115): a, c, g, or t
  modified_base (1121)..(1138): a, c, g, or t
  modified_base (1141)..(1141): a, c, g, or t
  modified_base (1143)..(1143): a, c, g, or t
  modified_base (1149)..(1149): a, c, g, or t
  modified_base (1166)..(1166): a, c, g, or t
  modified_base (1168)..(1170): a, c, g, or t
  modified_base (1175)..(1176): a, c, g, or t
  modified_base (1178)..(1179): a, c, g, or t
  modified_base (1188)..(1189): a, c, g, or t
  modified_base (1194)..(1194): a, c, g, or t
  modified_base (1203)..(1203): a, c, g, or t
  modified_base (1207)..(1207): a, c, g, or t
  modified_base (1216)..(1216): a, c, g, or t
  modified_base (1220)..(1220): a, c, g, or t
tttttttttttttttttttntntnnnntnnnntactttttgaaagtttcatttaggtgctatcatttaaaaaatcagaagatntnnnttaagaatccagcattctagtttctttcgaaaaatcagaagatctggcaacactaggcccacattccggcatggcaacaaccagctagagcggtgctggctgttccccctctgtggggcttgtgctctggtttctgaagtcctaaccctcaccaggcccaactgccacctacgccagctgcatggcccctacactgtgtctctgcacgaggcagcccagcaggaaggaacaaaagtgggggtgatgagaggttgtcctgttcagccctccccactacccacaggcctgggcacgtgaaggaggtcagagtagggtgagcaggaaggcagggggggtcccggacaggacacaccccagcctctctctgatcactgtgcatggcaagcagcgtcccaggcaccccacgtgtcctggcccagcccaagcctnccttggcggccgggtggctgcaattgcgtagcttgctgtcttggtcctggccactccacatcctgtcagagctgggcccacgacctgaggccttgtcctgagcctgagcaatatggcctgtaggtacaggcttcctcactgtccatccagctcagctgaatgtgcaccagggtgtggcggtcttgtcacagtcnnnnnnnnnnnnnnngacagtgcagggggccccnnccacagacagggcagtgcgggaagccacatggtnnnnnnnnnnnnnnnngcctccctccctgtccaccttgaactgctcctgtttttgagctgcgatgcgcttctggtccctcttccgccaggctgggtcntgcaggtggcgaaatgtcttgtacccagttgtgattcccgaggggcggaaaagctnnnnnnnnnnnccntnannnnncngnnnnannnnnnnnnnnncgnnncccnagccccagaagcggntggacatcccattgcacagccngtagtgntgcttggagagcagcaggatgccgccgacataggtcttgtantggtagagagggtnggagctccgggnangccacgtggaaggnccnnancctcannnnnnnnnnnnnnnnnntcntngttganagggagcaggtcaacgncnnncatgnnanngtagtccgnnctgtngctgctctncagnaagcccacnttgntgaaccctgcccggtggaactgaagtgg

1. A method of identifying oocytes that are capable of giving rise to a viable pregnancy when fertilized comprising the following steps:
(i) obtaining at least one cell that is associated with an oocyte in vivo;
(ii) assaying the expression of at least one gene by said cell associated with an oocyte, the expression of which correlates to the capability of an oocyte associated with said cell to yield a viable pregnancy upon fertilization and transferal into a suitable uterine environment; and
(iii) identifying, based on the level of expression of said at least one gene, whether said oocytes is potentially capable of yielding a viable pregnancy upon fertilization and transferal into a suitable uterine environment.

2. The method of claim 1, wherein said oocyte is a mammalian oocyte.

3. The method of claim 2, wherein said oocyte is a human oocyte.

4. The method of claim 2, wherein said ooycte is a non-human primate oocyte.

5. The method of claim 1 wherein said oocyte-associated cell is a cumulus cell.

6. The method of claim 1, wherein the expression of at least 5 genes, the expression of which correlates to the capability of an oocyte to potentially yield a viable pregnancy are identified.

7. The method of claim 6, wherein the expression of at least 10 genes, the expression of which correlates to the capability of an oocyte to potentially yield a viable pregnancy are measured.

8. The method of claim 7, wherein the expression of at least 15 genes, the expression of which correlates to the capability of an oocyte to potentially yield a viable pregnancy are identified.

9. The method of claim 8, wherein the expression of at least 20 genes, the expression of which correlates to the capability of an oocyte to potentially yield a viable pregnancy are identified.

10. The method of claim 9, wherein the expression of at least 20 to 50 genes, the expression of which correlates to the capability of an oocyte to potentially yield a viable pregnancy are identified.

11. The method of claim 10, wherein the expression of at least 50 to 100 genes, the expression of which correlates to the capability of an oocyte to potentially yield a viable pregnancy are identified.

12. The method of claim 1 wherein the method of assaying gene expression uses a method that monitors differential gene expression.

13. The method of claim 12 wherein said method comprises indexing differential display reverse transcriptase polymerase chain reaction (DDRT-PCR)

14. The method of claim 3, wherein the oocyte is obtained from a woman who is at least 25 years old.

15. The method of claim 14, wherein the oocyte is obtained from a woman who is at least 30 years old.

16. The method of claim 15, wherein the oocyte is obtained from a woman who is at least 35 years old.

17. The method of claim 16, wherein the oocyte is obtained from a woman who is at least 40 years old.

18. The method of claim 3, wherein the aberrant expression of said at least one gene by said oocyte-associated cell is correlated to a condition selected from menopause, cancer, ovarian dysfunction, ovarian cyst, autoimmune disorder and hormonal dysfunction.

19. A method of assessing the efficacy of a fertility treatment comprising:
(i) treating a woman with a putative fertility enhancing treatment;
(ii) obtaining an oocyte and cells associated therewith from said woman after treatment and measuring the expression of at least one gene by a cell associated with said oocyte, the expression of which positively or negatively correlates to the capability of said oocyte to yield a viable pregnancy upon fertilization and transferal to a suitable uterine environment; and
(iii) evaluating whether said treatment is effective based on the level of expression of said at least one gene by said oocyte-associated cell.

20. The method of claim 19, wherein said fertility treatment comprises hormonal therapy.

21. The method of claim 20, wherein the subject is menopausal and the treatment comprises hormone replacement therapy.

22. The method of claim 1, wherein gene expression is detected by real-time polymerase chain reaction (RT-PCR).

23. The method of claim 19, wherein gene expression is detected by RT-PCR.

24. The method of claim 19 wherein gene expression is detected differentially by indexing differential display reverse transcriptase polymerase chain reaction (DDRT-PCR).

25. The method of claim 19 wherein said oocyte-associated cell is a cumulus cell.

26. A method of evaluating fertility potential in a subject comprising comparing the expression levels of specific genes (‘pregnancy signature genes”) in a cell associated with an oocyte, wherein said genes are expressed at characteristic levels (upregulated or downregulated) in an oocyte-associated cell, wherein the oocyte associated with cell is capable of yielding a viable pregnancy; and determining whether said subject is potentially “pregnancy competent” based on whether a cell associated with an oocyte of said subject expresses one or more pregnancy signature genes at levels characteristic of pregnancy competent oocytes.

27. The method of claim 26 wherein said oocyte-associated cell is a cumulus cell.

28. The method of claim 26 wherein said method monitors differential gene expression by indexing differential display reverse transcriptase polymerase chain reaction (DDRT-PCR).

29. The method of claim 1 wherein gene expression is detected using antibodies that specifically bind to “pregnancy signature” polypeptides.

30. An array of at least two different polynucleotide sequences or polypeptides encoded thereby the levels of expression or absence of expression correlate to the pregnancy potential of a cell that is associated with a mammalian oocyte expressing said polynucleotide sequences or polypeptides.

31. The array of claim 30 which is a polynucleotide sequence array.

32. The array of claim 30 which is a polypeptide array.

33. The array of claim 31 which comprises at least 10 polynucleotide sequences.

34. The array of claim 32 which comprises at least 10 polypeptides.

35. A method of using an array according to claim 30 to detect whether a cell expresses pregnancy signature genes.

36. A method of using an array according to claim 30 to determine the efficiency of a fertility treatment by detecting whether cells obtained from a fertility treatment subject express one or more nucleic acid or polypeptides contained in said array.

37. The array of claim 30 which is comprised on a filter or glass chip.

38. The array of claim 37 which comprised a detectable label.

39. The array of claim 38 wherein said label is a fluorophore.
